United States Patent Application Publication US 2026/0027161 A1 - sequence listing, part 5

SEQ ID NO: 19 - DNA, 1140179 bp, Intestinicoccus colisanans
  source 1..1140179: mol_type = genomic DNA
ttgaaaaaggatttcggcaaaaattattgtccgtgtccacttttgaaaaaacaacttctgcaaaaatattcctcatgtctacttttgaaaaagcaaatcaaaaataaatatttttcgtgtctacttttcttgactactacagccggcagaacgcgaatgcaaagtattttggatttgacaccggaagttgttgacgagctgattaatcttgatttgaaaaacagcttgttctgtatgcagaccgccgcaaaaattatgattgagcgcaatatacgaggaagtattgtaaatattacttccagtcgtgcagaacgtgcttatcctgaagatgcggtttacggcggtgtaaaagcggctattcgtcgagcaagccaatcggcggcgcttgatcttgcgccctacggcatccgagttaactgtgtagcaccgggcgccattgccatacgaagcaaagaatatttagcgaagcttaaatggattcccacggatttttgggaagaactgggaacgcgcatcccgcttgaacgctcaggcacgccggaagatgtggcaaacgccgttgcgtttcttgccgatgagcagtctgattacattacgggcgaaacaattcgggtcgacggaggcctgattttgcccggtatgccggaaggaagaaacagcacctcttggggtgcccgtaaaaaagaggaataatccatgggaattgaaattcgtgatgttcgagtaatctgcacggctccggaaggcatcagtctggtcgtggtgaaagtactgactaatgaaccggagctttatggtttagggtgtgctacctttgcacaccgctatcgtgcggttgaaaccgttattaatgactatttgaagccttttctgatcggaaaggaccctgccgatatcgaagatatctggcaatcggtcatgggaatgagctattggcgcaacggaccggtgcttaataatgccctggcaggtgtggatatggcactgtgggacatcaaaggcaagatggcgggaatgcccctttatcagctttttggcggcaaatgccgccctgcggttccgtgctatacccatgccgaaggcgcttcggcagatatcgttgttgagcgcgttgcagcattaagagagctgggctatcggaacattcgtgtacaagccggcggctacggtggcggtaagggcgctcaaattcataaaccggaaaatccgccgaagggtgcatattttgatccgaaagcttatatgcgcacgactctgaaaatgatggaaaaacttcgttcggtctatggcgatgaaattgaactttgccacgatgctcacgagcgtcttgcaccgattgatgcggtgaattttgctaaagccctggagccgtatcatctgttgttcttggaagacgcccttccgcctgagcagtgcgattggtttaaaatgattcgccagcaatgtgctacaccgattgcgatgggtgaactgtttaataatccgcatgaatggagacatttggtacaggaacatctgattgattatattcgtgttcatatcagttattcgtgttcatatcagtcagatcggcggtattactccggcgagaaagctgattgcactgtgcgatgcatacggtgtccgcaccgcgtggcacggccctgtcgatatgacccccatcggtcatgccgtcaatctgcacatggatatttcaagcccgaatttcggagttcaggaatgggcggacagctttaccggtctgtatgcgcagcttaacggtcaactgatgaccgaaatgttccccggaatgccgcagcgtcgagacggatacctttatttaagcgatcggccgggtatcggtgtggactttgatgaaaaattagccgcaaaatatccttgcaagcccggtgccgtttcatgggattggatgcttgccaggctgccggacggaacttcggttcgtccgtgattggaggtaatctgtttatgcctaaatataacccgaatccgttatttccgaacgaacctttatttgagatccatgatttttccgagcttccgaaatcgccgagatacacactgtattgcaacggtcaggagcagaccgtttaccacacggattcttttgattacgcgattgtagtgcgccgcgatgatgctcccgtttccgtagaggtttgtgtttcggacagctttaaaaaagccgttttgcgccctcagtctttagaaattccgtttgacagagaagaaaatcatattcgattttcgcttccgtataaagcaaaggtgagccttgaattggataacgatttgaagcgaccgcttttgattctttccagctgctatgttgcgccgcgttctaaaggcgaaacctattatttccggaaaggacagatttacaatgtcggaaatctggagttaaagtccggggaaagcgcttatttagaagaaggctgtgtggtttgcggccgtatttattcgaatatggccgataatgttcgtgtctccggaaacggaattctttacggaggcgtttggcataagccggatgaaaacggcggtcgccttatggtgtctttttatctcggcaagcacattcttgttgaaggaatttccgtggtggacaacggtgtttggaatgtggtgccgggggcttgcagagacgttataattcgcgatgtaaatattatgtctcgtcttgttaccggcgacggcattgatattgtcggttgcgaagaggttttggtagaggattgctttattcgggcctgcgatgactgtgtttgcatcaaggcctgtgcgcttcccggtccggcagcctgctgcaatgtgcgggatatcaaggttcggcgctgcgttctttggaatgccgaaccgggcaatgcattggaaatcggctatgagctgcgctgtaatgaggtttcagatgttgtctttgaagattgcgacattattcattgcgaatatgaaggcaatcagtccggcggcgttttgaccattcacaatgcggatcgtgcaaaagttcataacgtacgttacgagaatattcgtattgaagatgcgcaggagaagcttgtagatattaaaatactcgattgcaagtattcgttggatcgtgttcgcggtgatgtggaaaatattgtattccgcaatattgatgttacgggtccgctattccccgtatccatcatccgcggctttgaaatgacaaacgaaatgcaccgcccgcgagatatacgttttgaaaacgtgaccgtgcagggccggacaatgcactctgcaaatgaaatgcgcatggttgttgagctggcacacgaacttcaatttgaaggaagagtaacgctggagaagccggagtattaagttaagttccgcttatctgcgtttttcatatcctttacgctgcaaatttgaataggtgtactcacgcaagtaatggtgagtacgcttgttttgcatttttaaacacttatttctccgggttacggcaacagaaagttatactgtgtataaaatatagaaattcgaaattttttgaaggaaaggtgacaacgagtatgattcaaactttgattgtggacgacgaaaatatagaacgtcagggaattaaacgtcttatcaacagttatgcactgccgtttcaagttacgctggcatcttccggaaaaatggcattggattttatacgcagcaacgcagttgatttaatgctgacagatgttcgtatgccgattatggatggactgcagctggctgaagcggctttgaatgaaaaggcgaacttacaaattgtgctgatcagtgggttcagcgaatttgaatatgctaaaactgcaatgaagctcggtgtgaaggattacctgctgaaaccggtaaatcctgttgaatttcgcaatacaatgacaagaattgccgagcagatcatgaaacagaatgataaaaaggataaagaacagtttacggatttacaaatgcgtaaatatgtgcttacctgcctgctgaacggaacaccttcggagtttcagcgcatggagcagcgaagagaaatcagtatagcgtttttaaaagtgtatcgccgtgtatttcggttgaattttgaagataattttttgaataatatcggtgtaacgaaccgcatttatcagtatttgacaaaggctgtaccgggcaaatttgattttgtccagatcaacgatgcttcttgcgcattttttcttctttttgatataaatgatgaccaatgcgctcaaattgctttgaaattatatgcttggtccgaatctgctttgcatcagactgcaaatattgtaatcagtgagagaataaattcaacggaaaagctgatgcagtctgtcgttcagataaagagcattgcgcagcagcgctttttgatttcatcgccgatcttgttcgccgatgggcaaacacacacccagacaagcccttcggataatgaacaacagcttttggagcagtttgaaaaattatgtcttgattatcggttttcaaaagcaagggaaatactgtacacgatgcgaagggaaaagaatttttctcacctttttgtgaaatccggtatttcagctgctgcggcaaagctgtttcggattttgcccgaaatttcggcggaacagacctatcagattatcgaaagcatctggcgtgcggaatctatgcagaaactgtgtgatatcctgcttccgattttggataaagccgagcagaaattcgcagaaacgccggtcaaagccaaaaaactttcggatctttcaaagcagtacattgcggaacactaccgtgaggatatttccttgcagacaatatcagagtctctttttatctcgccgcagcacttaagttctgtttttaaacgtgaaaccgggcagggattggcaaattatctgcgagcatatcgtatgaagtgtgcaaaagaacttttgaaaggtacacgaaaaaaggtatctgtcatttgtaaagaggttgggtatccgaatgaaacttatttctgcaaaattttccgtgatctgtatggtatgagcccgcagcaatacagagatgaaggaacaaacggaaaggaacaattatgaaacgtattttgcgcctgtttcgagatatgaaattccgttataaattgatacttacatatatttttatttgcgctgttccggtcctgttttttggaggcttttcgtttgcacgtgttcaaaatgaatccgaacagcgcagacaagacaacactcgagctacccttcaacaggcaggaagcgaactggatgcaaagctcgcacggcaggaaagtacgctgcgttcattagtattcaattccaccgttatacaagcgctgaatgcagaatataccggttactatgatatgtatgaaaagcttgtggtacagcttgacgccgtggtacgcagcgtagagctgtataatccggatacggacaaaatcttattttacagtgaggcttccgaggttccggtggaagattatctgcttccgattgaacggatacagtcatctgcgtggaaagataccgtaatggcagacgggtatccgcattggttttccgacaataattccgatgtgtttttggcacagaaaattgtaaatctgcgtggtgaaaatcgtccgaatattctgtacttaaagcccgattcgaaagcgctgttccaaccgcttttggatattgcagatgaagatttcggattctatatccttgaaaacgatacgggtaatatcttgtttaaaaaatcatccgcaaatcttaagtcgttggggatagaggacattctccgctttcaaaataacacaaaggaagcccaaaaagcgggtgtcagcgttttgtctgtaccgctgcaagcgcagccgtggacaattttattttatcaggatacccgcatagagtccggatatgcggaaaaaatggtttggtactatatgggaacgattatggcgatgctcttgctctctatttttatttgttggctttttatgggtaatatggtcaagcaaattgaaagactgacagagaatatgcggaatatggtcggcagcggcaatcaactgcagattacggtctacagtgactccaaagatgaaatcggagtgctgacaaatgcttttggcgagatgattcacagtataaaaaaattgatgcgagagattggtgaaagcgaagaaatggaaagagagtttgagctgaaagccttgcgcagccaaatgaatctgcattttttgtataatacgctctccgtgattaactggaaagctatggagagaggagctgatgatatttgtgaagtggtacagcttctttccacgttttaccgtacagctttgaatcacggaagcgatatgatcagcgtagaaaacgaattgaaaaatgtgtgctcctacattcaattacagcaaattatgcacgataaaaagatagaagtacggtacagcgtaaatccggatttaaaaaaattgcagattccgtgctttatattgcagccggtggtagaaaatgcgtttctgcatggtatcgatgccgaagaaaatcgggatggatgcattgaaatcagctgtcaaaaggagtcggaaaaacttgtttttgcggtaaaggataacggctgcggtatgacggaaaagcagatagaaaaaattctgactacacattccaatggatatggactgaaaaatgtacatgaacgcatacagctttactacggaaaagcgtatggcataaaaattaacagtgcgccgcatgttgatacagaagttacacttgttttgccgattgatgacaaaaagtgcctttttgcacaaaacacaaaaaaataaacataaatcttaaattattttcatttactccgatttaagaaaatagtacaatttaaacaaggaagcaaacaaggattgcaacgatcgatcgcaaaactggggctatggttgtttccataaaatgtagggagttgaacaaacagttatgaaaagctggaagaaagtattaagtgcttgccttgcagtcttaatgctgaccggatgcagtgcggcacccggcagttctgcaagcgatacaggaaaagaaaattcctccgcaagcggtacggaaagcagtgcggcagatgatggctggaccttggcagcgacagatccttgggcggcatacccggaaaccatcacatacacggtcggtaaagccgcaccggatgcaggctattccggtctggacggaacggaatatgaaggtgacaacgaagaaaacaatattcgtacccgtttttacgagaagcatttaaatgccaaaatgaagcttgcattttctgcggcgtcgggcgaagcatacgatcagcaggtgtccatggcacttgtaagcggtgaaattccggatatcatgtgcgtcagtgattacactacggtcaagcagcttgcagaaaatgaccttattgccgatttaacagatgtgtatgaaactgtggccagcgacattacaaaggacttgtatgattcctatgatggtcgctgcctgaacggtgccagtgtggacggccgcttgatggcgttgccgggcacgacgatcgataccggcgccgaactgctgtggctgcgtcaggactggatggataagctgaatctggaagcgccgaaatcgttggaagatgtggaagcaattcttaaagcattcgttgaaaatgacccggacggcaacggcacgaatgatacgatcggcatgattctctctaatgggatctacggaaaatacggtggttctccgatgtatgccaacaatgtgtttgcggcgttcggtgcgactcccggtcagtggattgagaaagatgggcaggtcgtttacggttctgtgcagccggaaatgaaagatgctttacaggttcttgcgaattggtatcaggaaggtcttattgacccgcagatggcggtaagaaatcaggaagacagccagtcgctcgtaatcaatggccagtgcggtgcagtatacggtccgtggtggacctccaattggatcggtcagacgcacaccattaaccgtgatgcaagatggacaccgtatgttgtgcctgtcggtgatgacggtaaggtgaagacgtttgcaaataatccgtgcgaaggctatcttgttgtcagaaagggttacgaacatcccgaactcgttgtgaagctcttaaactacacttatgattatacgcgcttcagtgagcataagaacgatgaagactgccttgagttcgaagatccgtacggtggctacatctattcgcgttcgctgggcccggtcggcatcaactttgactattttgatgcaatctaccgtgcaacggatgacattaaagcatatcttgacggcaaagaagtcgatacgttcccttggattatcacttgcggagagtattgcaagtcgatgattgaaaaaatggattccgatgattgggaaaatatctcgcacgtagaggcgactcagtattacggtcgttgcgtagcaggtgaagtaatggaggagaccgaatcggatacagtttatcctgtgttctatggcgttacatcttctatgcagaccatgtgggagagcctctctaaaatggaatctgagactatgctgaagattgtaacaggtgaaaagccagtggagtattttgacgaatttgcatccacatggaaaaccgccggcggcgatgtaattacgcaggaggttgcggaagcaattaagtaagatttgtatcgtgagttgtctcttacaaagggacagctcatattttatcaaacaaggagcgtgagttggttgtgaaaaattggaaaaaccaattggcttttcacagtatgctgttaccgggcgtagtgcttttgttgatattctctgttgcacctatgttcggtatcgtcatggcctttcaggattttgttcccgcaaaaggtatattagggtcatctttcgtcggtctcaaatatttcaaattcatgtttgcactgccggatagccgacaaatctttgcgaatacgttaattatcgctataggaaaaattattttcaatatgatcattgcagtgctttttgctttgctgctgaacgaaatcagagtgcgttctatcaaacgatgtgtgcagacaattgtctatcttccgcactttctttcatgggtagtcctgtcaacggtcgtcattaatatgttctcttttgagggacctatcaatcagttcctcggggtctttggtgtaaagccgatcctttttctcggcagcaacacctggttccgtccggtgatcattgcaacggatgtctggaaagaatttggatacaattccatcatttaccttgcagcactgaccggcattgacaccggtttatacgaggctgcaagtattgacggcgcaagtcgttggaagcaaacactgcacatcacgcttccttctattttgcctacgattatgcttatgtgcattttgaatatgagcagtattttaagtgccgggttcgatcaaatttataacctgtataatccgtttgtctatcaaaccggcgacattatcgatacatatgtttaccgcgttggtctggtacagaggcagtacagcttgggcacggctgtcggccttatgaaatctgcagtaagctttatcctcattgtcggctttaacacgcttgcggatcgatttgcaaaaatcagtgtgttctaagcggaaaggaatggcaaatatgattacttctaaaacactcggaagccgtatttcacaggcggttatatgggtgcttgtaattgcaatggcactcatctgtttgctgccgctgctgaatatggtagctatatcgtttagctccagcacagcggcttctgcaaatattgtcggaatttatcctgttaatccgaccttggagtcttacacaaagctgctcgcagatgcacagttctggcgttctttcggcatttcggtgctgcgtgttgttttgggtgcatcgctgaatgttctgcttacaattttgatggcttacccgctttcaaagcctaagtcccgcttcaaagcacagccgatttacatgaagttcctgcttttcactatgcttttttccggcggtacgattccgatttatcttgttgtgcagaatctcggccttgtcaattctatttgggcgttgattctgcctacggccgttccggttttcaacgttatcattctcatgaattttttcaaaggtacaccggatgcgcttgaagaagctgcaattattgacggtgcggggcagtggacgattttattcaaaattttcttgccgatctcgctgccgtcgctggctacagtaggcttgttcagtattgtcggtcattggaatgattactttcagggtcttctttatattcaggcagccgagaattacccgctgcagacctatatccgccagcttacggtggacactaccaccattacggatccggaaaggctgcaaaagctttcacagatttcaaacagaacttttaatgcagctaaaattgttgtttctacggtgccgttattgtgtatctatccgtttttgcagaaatatttcgtcacaggcataacgattggttccgtaaaagggtaatgaagaacatagaaaaggagtagtgcaaaatgaatcaagttcgcattggtacaattgttcccggagacagagtacatgacctgctgccggagtttataaaaagcggctttgagtgctttgctttaaatttccacatggaatttccggatgagagcttagcggcatttgccgaacgcgtaaaagccgcagtggacggtgaaatgccggaaatttcttcgattggttattactgcaatccgcttgaaaacgaggagcaactgcatattttggagaaatttattgacggtgcgcatctctttaatacgaatatggtgaccacctttgcaggtgcactttacagtcgtccggtggaagaagctattccggtttataaaaaagttttcggtgagctggctaaacgcgccgaggcgaatggcgtacgtctttctattgagaactgcacaatgggcggaacatggcgcagagcaacatacaacatcggctttaatccgcgtgcatggcaaatgatgtttgatgctgttgacagtccggccatcggattggaatgggagcctgcacaccaaatggtacaactgattgatcctgtgccccagctggaagaatggatcggacgtgtgtatcaccttcacggtaaagatgccaatattgattggaataaagtcaaaaaatacggtgtatccggtgcatcacagtttgcaattcccagaacgccgggatatggcgatacagattggcgtgcgattttcgatgtgctctatcggcacaatttttcgggtgatctttgcgttgaaggtttccatgatgacattttcaacggcgatttggaagtagcgggtcagaaacacgctttaagatatctgaaatggtgccgcggcatctgaacaatcggaagataacatatacatatagattttacctctctgaaagaagactttgcgtgcaaagtcttcttttgtctgtgcttcttcgttagaatacctaaaaacagagcgtttcagcttttagctgaaacgctctgtttttaggtacggacagcccggacttttctgctgttcggcaaggaagtatcggctgcttaatattgccttttatattgttattttttcagctttaagccgtctcaaaatgcctcgcccacacgctctgtgaccttataatagccgtgggtgtaggggtcaaatgcgatggcgttgaccttagacatatcaatttttccgtccaccataacactctcatcagcggtgacattgactaccttaccgatgacgccgcagccatattcattgttctgatactcaatgaatttgcactccagacaaatcgggaactcgttgatgacaggggcatctacagtttcggctttgctcgcggtcagaccgctgcgggcaaatttatctgcaaccttattgccggactctacgccgaaatagtctgcttcggccatgtgcgcggcgtcggcaatgctgacggtaaacgcgccccgtgtcttgatattctgcacggtcttgtgagtctcggtaagattcagcgcaacgatgtcccgttcctgcatggtaccccatgcagcattcatcacatttacgctgccgtcctcgttataagtcgcaaccatcagaaccggcatggggaaaataccctcggtaattttcagatttgttctcatgacaacttctccttttgatcgtattgacaggattgtttatcctgcttataattatacgcaggaaaatcagaaattcaagtactgtctaaaaagacaggtactatccttggagaaagcaaatgattaagaactatattgaaaacgccaattttgaggacaccggctttgcctacgcgctgtcgctgatttccggcaagcacaagatggtcattctatattgtctgatggagtttgaaaccgtacggttcaatgagctgaaacggtatctgaaaactatttccgacaagactctcagcacgaatctcaaggagctggaagccgacaaactgatcgtccgcaccgagtatccgcagatcccgccgaaggttgagtattccctgtctgagcgtggaaagtctctgatgaccgtgctggatcagctctgtatttggggcgaagaaaacagattgcagaattagcatttccttgtagcctcagtatatatactactatccataagtaaatcgtacagctatgccataggaacgctgccgaatagagatcttcccgatttatataaggccctcatgcgcttgccgccttttttgcgtgaaaatattactttaccgaggtcttcactctacaaaatgaatcctgcttcgatcaaagcgatcctgctgtgtccgttcctcgtccgggtatccgagcgcaaacagtgaaaaaacagacaagttttccgtaatacccaaaatctgacgggcctgatccatccattcctgaatgggagatatcccgatgcaaacaccgccgaggccgagtgcatctgtctccaaccagatattttccagcgccattcccatgtcgatcgctaccattggtaaagccggaagaccttctgttcgataaacgggaacgatgattaccggcgcttttgccgcacatctcgcgtagggtgtgatttgcgacagcttttgtatggtttccttatcggttaccacataaaattcccaaggctgctgattacacgcgttcggagcctgcattcctgctttcaatatctgaaggagcttatctttttctacagggcaatccttgtattttcgtatgcttacgcgatgataaatattgttcatatcacattctccttataaataaaaattttctgacatttttgagcttttcataatcttgacgttttatctgcctgatacggcggacttactgggttcggctttttgcggctataaagcagatccgaatgattttaaacactgaaaggcgatgaagcttcggaacttttacaaaagccgaaacctctcgggtgcaaacggcgtttcatggaagacgatgcgccacgtgatcttcttcggaggcgcaaaatgcagcgccgagcaggcggtcagcacggttttgtcttcgctttttgccgtgacaaacagcgccgtgggtccgtctgcgccaccgatgatgccgataacggcagcgttttgcgcttcgggcatgaacgggtagtccttgggcgcttcgcgctcaacaggcggatcgttctgcgcgcagtcctcaacggagatgaggtttttcggcggggcaggcgagaccgtataggtcattgcggtaaatcgatttggaaaatcgaaacgcgcgtcggaaaaagcgtttttcggcagcgtctgcggctccaaattctgagccgtcagcgtgtacggtatgccgttatgggaaaacgtaaatatgtcgccgggcttttgaacttcaaactccgcgccgggcacgcgcacgggctgcggggtcagcgtcaacgcgagcgacgaaatgcttttcgggcggcgcttcgtcttccacgggaacgaatagcggtgaatcgcccagccgtcttcggggtttagcccgtagtggtcgatgatcgcgcgctcggtgggcgtgtcaaaatcgatttcgtcttcgtcgagtgcaggctcacaagccgcagcgttttgaaacagcgggtggtacgaaagcccgtgaccctgcgaaaacgggagcgtctgtccgttcagctcaatttgcggcgaaaactcaaaagccagcggattttcgcgctccgcctgttcgaatacatcgttcggcacgtcttcatcttcaaggtgctcccattttttacagaaatcttcgagcgccgctttatcagcgcgcatgagaatgtcgagcacaagtccttttgcggtaaggtacgccgcgggcacgtaccaatcgcgtcccgcaaagcggaacttttgatttagcttgagcacctgcccggggtggctgccgtccgggcttttgccgccgaagctgccgttaaagtagactttccacacgtctttcatggttattcctccatttcctttttcgcccagtcggcgtccttgaaaatcgcgcggcctacgccgatgaggtcggcggcgccttcctcaagcagtacttcggcttcgttcgcctttgtcacgccgcccgtcagaatgaccggcacatgcacggcttcgcgaatcgcggaggaagcgtccgaaaagaaaccggggccctttctgtttttcaccgtaaagccgcagaagccgccggaaatatcgagcaggtcaacaccggctttctcaaactttttgcaggcatacaccgcgtcgtcaatggtcgcgccgctctcggtgtagtcgctcgcgccgagacgcagggcaacgaggtaatccgcgcccacggcttcgcgcaccgcgcggatgacgtccaaaagcaggtgaatgcgcccgtcgaggtcgccgccgtaagcatccgtgcgcttgttgccgagcggggagtagaactggtcaaggagatatccgtgtgccgcatgaatttctacgccgtcaaacccggcttcttttacgcgcagcgcggcttcggcaaacttttttgcaacggtgtgcatgtcgtccgcggtcatttcgcgcacgggcttttcgcttttgcgtgcatactccgactgtgccgtgacgctcgcactgattgccggatagccggtgatttcctccattgccgcgctgcccgcgtggttgatctgcgcgatgacgcaggtgttgtttttatggatggtctccacaagctttgtaaggcccggaatatcggtgtcgcgcgaaacggagagctggccctcgtgtgccttgccctcggggctgatgtaagcgtgttcggtgacgatgagtccgatgcagccgcccttggagcgcgcgtcgtagtatgcgagcaggtcgtcctgcacggtactgtccggtgttttgccggttgccatcggcggcatgacaaggcggtttgcgagttccacattatggacggtgagcggggtgtgcagcagtttgttcatggtgaaaattcctttccgtttggtttttaaagcgatgctgttttatttaatataatgctgaaattactttttggtgcagtgtactgaggatgagcacagtatatcacagcggttttcaactttccagatataaagcatgaaaaaacggcttttggacatactgaaagcgtattgcaaaacagaaaggatgaaaacgatgaaaatacaaaaggttctggcgacggaaattctcgattcccgcggcacgccgaccgtcggcgcaacggtcatcttgagcgacggctccgtcggcacggcgaacgcgccctccggcgcatcgacgggtaaatttgaagcgcacgaaaagcgcgataatgaccgcaagcgctatctcgggcgcggcgtgaaaaaagccgtggagggcattgaggaaaccgttgccccggtgctcgaaaatatgcagcgcgtgacggtgcagaacgtcgacagaatgctcattgagcttgacaacaccaaaaacaaagaaaagctcggcgcaaacgccacattggcggtgtcgctcgctactgcaaaggcgcttgccgcgcactataaacaaccgtttttccgctacctcggcggcacgaacgcacagaagcttcccgtgccgatgatgaacattttaaacggcggcgcgcacgcggcgaataacgtagatattcaggagttcatgattgtgcccgtgggcgcaaaatcgttttcggaggccgtgcgcatgggcagcgagatctaccacacgctcggcggcattttgaagcagcgcggtcttgcggtctccgtgggcgatgagggcggcttcgcgccgaacctcgcaagcgacgaagaagcgatagaggtcattttggaggccgtttcgagcgcgggctacacgacggacgaggtgaaaattgcgcttgacgcggctgcaagcgaatgggcggcgaacgacggctatcttttgccgaagcgcggcacaaaatacacctccgcgcagctcatcgcgtattgggaaaagctgtgcgaaaagtaccccatttgctctattgaagacccgctcggcgaagaggattggcccgcgtggacaaccattaccgaaaagctcggcaaaaaaatcatgcttgtcggcgatgacctgttcgttacgaattcgacacgaattcgcgagggcatcgggcgcaaggccgcaaacgcactgcttgtaaagccgaaccagatcggtacactgacggaaacgctcgccgccgtggagcttgcaaaggagaacggtatgaagatcgtcatgtcgcatcgctcgggcgaaacggaggacacaagcatcgcggatattgccgttgccgtaaacgcagggttcatcaaatccggcgccccgtgccgcagcgaccgcaccgcaaaatacaaccgcctgctgcgcattgcaaaggaaaatgaaatggacgaaatgtacggtacaggcaaataaaaaagggtatctcggttttcgccgagatacccttttaagttcagaaaaggtttaccaatccagaccggagaacttgtggaagctgtccatgctgatgcggacgctttccatctgggtcagctgggtgtgatcctgctcaagcacgatgtactctgcgccaagctcgttgcccttgttgatgatggactggatgtccatgatgccggtgccgatttcgcagaaatccttgtggtcggaacccttgccgaagctgtcccacgtgacgagcacgttcgggtcgttgacggtccacaggttgatcggggaatcggaggtcttggagaaatccttctggtgaatgagcttcaggcggtcgccgaggcggtccataacagcgagcggatccatgccgccgcgcattgcccagaacgtatcaagctcaaagctgacgtagttcgggtcggtattgtccatgatgtggaacagaatctccttgccgttcagcttctggaactcgtggtagtggttgtggatgaggaacttgatgccgtgctcggagagctttttgcccgcccagttgtaatactcgcagcgctccatcagctggtcgtagccggtgtagaaatctgcggactggccgaggtacttcgtgcccacctgcgtgtggtacgcaatcatcgggtcgatggtctcctcattgatggggcggatgtgaccgctgatgaggtttgcgccggtctcttttaaaagcttctgcatgtcctcaacgctgacgccgaagcctacgcccgggtctgtatctgcgttggagcttgcaaactcaaggttcttataaccaatctctgcgacctggcggatcgcgttgatcgggtcttttttcatttcgtcgcgcacggagtaaagctgaatgccgactttaagtgccataataggttcaatcctttcttgtccgtttgcctgctgtgcaggtcatttcactataattgtactgcgtttttactctgccgtcaagcgtccgaaacgggaggtatgcatgcaaaatatgaattaggaaagttacaagacggtatcctgcgtatttcgggtcagagggggaagaaacaaatgtgaatgaagtttttcgcctttttgaagacaattttaaaaaattacaaaattgtaatttgatacgccgttacggtgtgcaactcgaaaattatttgattaaaagataaacatgatttgacaataaaaacaaaggtacgtttatgctgtttcaacttacacaggaaaatgaaattgccctaaattgatcgaaatgactgaacaaaaagtattcctgcaaaatttccgaaatttttgaaaaaaccggtgaaatacagttgaataactgcaagcgttgtgaaagcggtttcatgaattctgcgaatttagcaatttgttgtcttttgaaaacgcatgaaaaatatggaaccgcttacacaaacttgtatggagtagaaagcgagatcaaaaaaaattaggcaagatgcacaaaccgaaaaccgatgacaaatttgggtaaaaaaccgagtataggctatttttgttgttgacattcacaaaagagggtgataaaatcacaaatgcaaacaaaatgatataccgcgtttttgtaagatgcaccaaatacaaagcaaatcgtttaacttgttttgttcgtgtctctttttctatggcagcggttccacagaaaagaggacaagtttcagtatgtttcagcgtcacgggggaaacctgttattcggatgttgcctcgggcaaaaacagccttgtgttttcttattgaaagcgcggtcatcacaatatttttaggaggttataccgtatggcagcagcagctaaaccggcaaagccggcgtatgagctgagcggctgggaacgctttaaaaaagatgttgtccgcgacaagtggctgtatcttctgattcttcccggcatgcttttcatgctcatcttccgctatatcccgatcttcggcaatgtgattgcttttatggacttcaacccctacaacatgtggaacagcacatgggtaggctttgaccagttcatcaagcttttcaataagccggcgttcatgcagactttctacaacaccctctacatctccattttgaagatggtatgtggcttcccgattccgatcatcctcgctttgatgatgaacgagatgcgcaacatgaagttcaagaaagtggcgcagacgctcctttatctgccgcacttcatttcttgggttgttatggccggtctcatcatgaatttcctcgatccgtccacgggcctcgttaccgcgctcctcaagagcatcacgggcaaggacctgcaggtgcttaccgacaaggcgctcttcgtcccgatgctgattatcaccgacatctataagacgatgggttggggcacgattatttacttcgcggcgctgtccggtgttgacccgcagctttacgaagcagccgagattgacggtgcacgcaagtggaagcagatgatcaacattacgctgccggcgattaccccgacgattgttatcatgctgatcctcaactgcaacaacatcgtaaacgcaggcttcgaccagatctttatgctgtattccgcactggtttatgacgtagccgatatcatcgatacgtatgtgtaccgtatcggtatccagaaggcagactactccttctctaccgcagcgggcatgtttaaatccatcatcgctctcgtcatgatcctcatcgtcaactttgttgccaagaagaccggcaacgagggtatttggtaaggaggttatgaacatggaaaagaacaaaatcaaaacctccacaggcgaaaagatctttaccgtattcaactacgcgttctttacgctgctctgcctcgtcatgctgtatccgttctggcatgagatcatgctttccttcagctcccttgaagcatccatgaagggcggcatcttcctctggccgaagggctttaacctggatacttataaatccgtatttaaaaacccgaacatctacacgggcttccgtaccacgatcatcgtcacgattgccggtacggcactgggcacgctgctcaccgctatgaccgcttatccgctttctaagtccagactgcgcggcggcaaagtgttgatgacgcttgtcctcttcaccatgattttctccgccggtatgattccgagcttcctgctcatccagaatatcggccttatggataatatcctcgcgctgatcctgccgggtctcgtaagcgcatacaactgcatcatcatgaagagcttcttcctttccattccggaaagccttgaagaatctgcccgcatcgacggtgcaaccgacctgcgcatcttcttctccatcatcctgccgctttccaaggcgaccatcgccaccatcgcgctgttcacagcggttggctactggaacgactacttctccacggtcctttatatccgctccgttgataagtgggctctgcaggcggttctgcgcaacatgctgacgaatacacagcaggcaatgcagcaggcaggcgtcaacgttatggcgcagacgaataccaacgcacagacaatcaaggccggtaccatcgtggtttctacggtgccgatcctcatcgtgtacccgttcgtgcagaagtacttcgttaagggcgttatgatcggcggcgttaagggctaagcccgcactcttttgggttgtcccgaagcatggcttcggaaaactatattatcatatttccaaagaaaggattttagtcatgaacatgaagaaaatcgcatccgttgttctggcacttgcactgagcgtaagcgtatttgcagcgtgcggcagcaacggcaattcttccgcaagctctacggcttccaccgagagcagcactgcttctaccgacagcagcactgcttctactgacagcagcgcagctgcgaccggcgataagatcgacgttctgaaccagagcgaaacgatggacgtttccgttgcagttatgaccggcttcaccgcagctgacagccgcgttcagaaggaacttgaggaaaagtacaacgttaagttcaatctcgttgttctcccgggttgggctgacggccagtcccagatctccctgctgatggcatctaacgacatgccgaacatcatgtggtggtggaccatggataccgagtacaacaagtgggtgaaggcaggtctgttggacgatgtctccgcttacatggataagtacaccgttatccgcgactactacaacaagatggacccgaagaccctcttctatgcatctgaggccgacggctccatttacagaatcccgggcgacgttgctgaaccgtcctgcgagaacctctggatccgccaggattggctcgataacctgaatcttaaggctccgaccacgatcgaagagctcaacgaagtgctccgcgctttcacggaggacgatccggacggcaacggtcagaacgacacctacggcctcggcggcgacggttacgacttccgttccttctggccgtggatccagtcctatgaccagacccattacagccgtttctgcgtagatgacgacggcgttgtcacctacggcccggctaacgagggcaccaagaactgggttagcgacgttgctgatctgtatgcaaagggctacatcaccccgaatatcacgcaggataccgaccgtgacgagcagatggcaaacggcggctttggcgtaacgtacagctggtgcgcatggaacaacccggactctgctccgatgatgtccttctatgcttccaacccggatgctaagtgggtaccgatcgacatggtcaagggttccaacggcaacccgcaggaagacccggctacaagcgctgcttgggcatatttcgcaatcaccaacacagcttccgatccggaaagactgtatgcaacttgggacgacatgtgcgattccgataactacatcgcacgccgctttggtatcgaaggcaccgattacaagtacgacgagaacggccagtatgtcgctatcgttggcccggactccgaggaaaacacctctaagaatatcggcctcaagctgttcgataacctcatgaaccgtaaggacgagtgcaacatctccaatactccggagacgaccgctctgttcaaaaagtccggcgaaaacagccgctatgctgctgctcacctcgttgagtggaaggatccggcttccttcgagtcctggacggagtgcagcgctgacatcgaggctgagaaggatcagtacctctggggtgtcatcgccggtcaggaatccatcgacgattgggacaactatgttgcaacgctgaacagcctcggcctcgaggacgttcttgctgaagcaaacgaggactatgcaacgctcagcgctcagatggaagagtacctcgctgctcacggcgaagcgtaatcgattgatctgatctcgattaaaatgtatacagatgggggaagctttcgggcttctcccattttgtttcttatgcaaaaataggccgcgaaaaaactgtgcatgtttgcaagaaaatgtgtgtttttttctctgtatgaaatttgcaaaaagctattgaattctcgctttgcatcggctacaatgcaaagaaaggcaaatatacgcctatgaaaatcccccgaaggagttgtaaaaaaatgagcaaactgtctcttgccggcgcgtggaagctgcgcggcgaatttatggacgttacggcagagcgctacaacgaagtgctgcgtaaaatggacgcagcccccgtgcgcgcaacgctgccggcgttcttaaagcttgaagacctttccgaagaagaacgggcagagttctttaaagagccgaatccgcatttccacgtgatgacggataaatcgaatcacgcgttcccgtctaaatacggctttatccccatgaccgtgccgggcgacgtcaccaccgccctcatcgaaaacggcatcgtagaagaaccttttttgaaggaaaacacaaagaaaaaccagtggatcaaggatctttcctggtggctcgtccgcgattttgacgtcacagaggagatgctgaacgaagacatcgtgcgcctcaacatcgaaatgctcgacttcaacgcggatatcatcgtaaacggcatgcctgccgcgcaccacgaaaacgcgttctgtgcgttcagcgaagacattaagcgctttttgcacgtcggcaaaaaccagctcgtcattcgcctcacttccggcatggagctgcactatccgcgcgacgccgtttcgttctactgcgcaagtgaaaacgccatctgtgaccagcgtgtctacacccgaaagccgcagtttacctacggctgggactggtgccagcccgtgcccacctgcggcatcggccgctccatcgagattgaagcgttcagcggtgcgcaggtcatcgcgtcccgcgtcgatacgttaaagctcgacggcgatgacgccgaagtggagttccacttcgaaatcgaaaaatccgacatggtctcaagcgccgagtgcgagcttacctatacgctcgaatttgagggtaaaaccgtttacaccggcaaaaaaacgctcgtgctcggcggcggcgtgaacttcgccgaggaacgcgtcacaatcaaaaacgcgaagctctggtggccgaacggctacggtgcgcagaacctctatacctttaaagcctgctgcgtcacaaagggcatcctgcacgagatgcagccgaagaagatcggcattcgcaccttggagctcgatacctctaagctcgaagacggcagccgcaacttcttctttaaggtgaacggcgtgcgcatcttctgcaagggcggcaactgggtgccgacggattccctttatctgcgcaccccgaaggaaagctacgagaccctcgtgcgcgagggcgcggcggcgcacttcaccatgttccgcatgtggggcggcggcacgtatgagccggattgcttctatgaatattgctcggagtacggcattttgctgatgcatgacttcatgtacgcctgcgcgttctaccccgaccacaaaaacgatttcctctttgaggcggagcgcgaagccgagtaccagacaaagcgccttgcacattatccctgcatggccatctggacgggcaacaacgagattgcggaatcctacaccgattggttcccggcgcccatcaagccggagcgcttctacggtgagaaaatattcaactatattcagccgcgtgccgtgcaccgcaacagcccgctcgttccgtatatgccgtcctcgccgtacttcggcgaccgcgccaacgaaagcgaacagggcgacgtacacgcatggtcgttcttcggccgtcacccgaaaacgaagttcaagtttgtctatgagcttgaggcgttcgaccgcatcccggcgcgcttctccagtgaatacggcttcttcggcgcacagatggaaagcaccgttcgccgttacctcgacggcaccgaaatgcgcttcgataaccccatctggaagcaccacggcgagtttgaccgcaagcgcagcaacatcgacggcgcgattgaccgccatttgacggagttcaaaaccctcgatgaacacggctatctgctgtacagcggcatcatgcagggccttctgtacgccgagcttgccgaggccatgcgccgcaagccgtacggcgcaggcgacctcatctggatgtacaacgattgctggccggagacaggctggacgatcatcgattattacctgacgagaaagatctcgttctatttcttaaagcgcgcgtttgcaacgaaaaagctcatcatccgcgcgtgtgagggcggcgcagaagtgaccgtcatcaacgaaacgcccgaagcgttcacggcggatattcactgcggatacatgaccttcaccggcgagaccgacagtctctgcacaaagacgctcaaggtcgctccgcactccatgcagcagttccacatttccgtatgcaatgatttgaagcacggcttcttctttgcaagcgccgagggttttgacaccgccgacagcctgcgtgcgtattaccgcgattacgtcttcccggaaagcgacgcgaagattgaaaaggtggagcaggacggcaacgatctgctcgtgacgatccgcacgagcgtgtacacgccgtttgcgtacctcatgacgagcgacgaccgtgtgcattacgatgataactacgttacgctctacccgaacgagccgaagacgctccgtgtggaaaactgcacggaaacgcctgtgctgcacgttgccgcacccgccccgagcgaagaaacgaaaaaagccagctatacggattcctggttctgatacgtactgaaatgctgccgcatagagccccgctttgtgcggcctgctttccataaaataacaaatataacgagttttgaaaggagtttcgcatgaaataccgttttcaagataacaccctgccgtttgaagagcgcgcaaaagacctgctctcccgcttaacgcgcgaagaaaaggtcggcatgatcacgtcgcagctcgatgatattccgcgcctcggcattaaaaagacgcacatcggcaccgagatcgcgcgcggcgtcgtaaaccgcgaccagaagcgcgagaccaccattctgccgcagccgtggggcatggcggccatgttcgacgatgccctcatggagcagctcggcgacatggcaggcgacgaaacgcgcatcacgcacgatatggaagaaagaccgtcctctctggagcttttcggaccgaccatcgatatggagcgtgacccgcgctggggcagaaacgaagaagcctatggcgaagacccgtgccttacgggtaaaatgagcgccgcctactgccgcggccttacgggcaaggacgagaagtatttgaagaccgcgcctttgctcaagcatttctacgccaacaactacgaaaacgagcgccagacgacgaacgcgaacatcaccccgcgcttaaagcacgagtattacttaaaagcgtttgagcccgccgtgcgcgaaggccgcgcgccgggccttatgacggcgtacaactgcatcaacggcgtagagggcgtcaacaacccggacgtttcggaaatctgtaaaaaagagtggggtatgacgttcgctgtcagcgacggcggcgatttcggccagaacgtcgccgcgcaccgtacgtatgaaaaccacgcgcagtctatgggcgacatcctcggcgtcggcgcggatatgatgctcgacagccgctccatggttgaccctgccgtgcgcgaagcgctcgaaaaaggctacctcaccgaagaaaacctcgataaagccgtgtattccacgttattgctgcgctttaagctcggcgatttcgatgaagaccacccctatgcgcacattgaccccgcaaagctcgcaagccccgcgcacaaggcgctcgccgtaaaagcggcaaaggagtccgtcatcctgcttgaaaaccgtggtatgctgcctttaaccgacgacggcaagtgcaccgtcgcggtcgtgggcccgctcgcaaatgagaactacacctgctggtactgcggctatgcaccgaaccaaacgccggtcgtcaagggcttcagagaaaagctcggcgaagaccgcgtactgttcgatgaaggctttgaccgcgtgcgtatccgctccgaaaaaaccggcaagtacctgcgcatcgccgaaaacggcgcggtatatgccgatgccgacgagaacaccgccgacctctttgagcgcgcggattgggacttcggcgcatggacgctgcgcagcgtgcgcaccggcaagtacctcaccgaggacaaaaatttcttcgacgagaccccgcaggacgaaaacgccgtcaccatcgaccccggcatgaactgtacggcagacgtggtgttcggctggttcgtgaaagaactgctgtatgccaaggaagaagacggcgttttgtacctcgatacctggcagcaccgcgctgtggccgtaaacgacgaaaataagctcgttgcaaaggccggctccggtgactgcccctgcaagcagtttacactggaagtcgtttcctccggcgcagagcgtgtggcagagctcgcgcaacgcgccgaccacgtcatcgtctgcgcgggtaaccagccgctcatcaacgcgcgcgaggagtatgaccgtccggatatccgcctgccgaaagcccagaccgcgcttctggacgccgcagcagctgcaaacgagagtactctgctgtacctcgtcacgggctatccgttcgccatcaacaaggagaaggacaccgccaaagccgtgctgtgctccacgcacctcggtccgtgcctcggccatgttgctgctgcgaccgtcttcggtgaaaacaatcccgccggccgcaccccgaccacgtggtatcgttctgttcgtgatctccccgcgcttgacgattacgacatcgcgaaaaaccatgtgacgtacctctattttaggggcaagccgctctacgcgttcggctacggcctcagctatacgacttttgcatacagcaatccgactgttaagcaggaaaacggcgaagtcatcgcgactataaacgtgcagaacaccggcgctcttgacggcgacgaagtggtgcagctttacatgagcctgccgagctccctgcgtgtgcgtcccatccatgcactcaaagctttcaagcgcgtgcacatccaggcgggcgagaccgtcaccgttacgctgaacttcaagatcgacgaccttgccgtttggtgcaacggcagaaagatctacacggtcgaaagcggcatgtataaaatggaaatcggcgcggcgagcaacgacattcgccttaccgccgacgtggagattgcaggcgaagcgttcccgggtcgaccgggcttcttcaagcaggaagccatcgatgccgatgattacagtggcgtcacgttcctcacggataagcgcgacggcgaaacgtatgtggaagcgaaggatttccgcagcttcctcgtatataagaacatggatctcaccggctgcaacgcgttcgagtgcgccatgagcgcgccctccggcgacgtggagatcctccttgcggataataagaccggaaaagttctcggcaaagcgggcggcacaggcaccggcagcctcacaaagttcacatcgtttacgtgcgatgtcgccgccgaagccggactcaccgagctgcgcatcgtcttcacaaagcagacgtccttaaagtggttccgtttttacacggtgtgagttttaaaccgatttaaattcaaaagttgaatactcgaaaagggacagcactgtgctgtccctttttgcatgtgtgcctttctgacggtcgctttgctcgccgttcgggagacccgattttttcagttgcatttgaaaccatacgaaaaaggtatactatgcccgaaaagcatgtggttcaatccattataagtatttgacattttaacccatcacgggtatactaaacttcaagtaaagtacagggcgtatatttgtattgatattcgttttcagaaagagggaagaacaaaagctatgttcagcggacgtttatgggagctctttatagactcctttccgaaaattctcatccccggcctgacggtcaccattccgctcactgtcatttcgttcacctttgcactcattatcgcggtcattatggcgctggtgcagttcgcaaacgtgaaggttttaaagcagattgcgcgtttttacatttggatcttccgcggcacaccgctgcttgtgcagttgtttgttgtgttcttcggcctttcccgcatcggcattttgctcgatccgtttccggcggcagttatcgtgttctccttaaatgagggcgcatattgtgccgagaccatccgcgctgcgcttgaatccgtgccgaagggtcagcttgaagccggtcagtgcgtggggcttacctacctccagaccattttccgcatcgtgctgccgcaggccatgcgtacggcgttcccgccgctttccaactcgctcatctccatggtcaaggacacctcccttgcggcgaacatcaccgtaacggaaatgttcatggtcacacagcgcatcgtggcgcgcacgtatgagccgctgcttttataccttgaggtcggccttatatacctcattttctccacggtgctcacttgggtgcagcgctttggcgaaaagaagctcgcgtcttacggacacaaggagggctgagttatgctgcaaattctggacattaaaaaatccttcggcgagctgcatgtgctgcgcggcgtcgatctcgacgtggagcagggcgatgtggttgccatcatcggcccgtccggctccggtaaaacaaccctcctgcgctgcataaacttcctcgaaaaagccgacagcggcaccttgatttttgataacgaaaaattcgaattcgataagatcaccaaaaaagagattgcgcgcctgcgccgcaaaacggcgttcgtgttccaaaactacaacctgtttttgaacaaaacagcgttgcaaaacgtcacagagggtctcatcgtcgcccgcaaaatgcacaaggcggaagccgttgagatcggcaaaaaagcgctcgacaaggtcggtctttccgaccgttacgattattacccctcgcagctttccggcggccagcagcagcgcgttgccattgcccgcgccattgcgacaaacccggagattatcttcttcgacgagccgacgagcgcgcttgacccggagctcaccggcgaagtgctttccgtcatgcgcgacctcgcaaatgagggcatgacgatgctcgtcgtcacacatgaaatgggctttgcccgcacggtctcaaacaaggtcatctttatggaagacggcgttatcgtcgagcaaggctcctcgaaagaatttttcgagaacccgaaggaggaacgcacaaaagcgttcctgcgcaccattcagggagacatggattgatttttgtcagtccgttatccatatttatcctacttaagcaaaggagtaagagaacatgaaaagaacactttctttacttatggctgtgctgatgctcacggcagtcgtgcttacggggtgcacctcgggcggcacaacgtccggtgcggcaagcagcagcgatgcttcctctgcatcgagcgaagcggaaagcgagtcttccgcagcggaagaaaacgacctgctcgcgcagatcaaggaaaagggcaccatcacggtcgcgatggaaggcacttgggcgccgtggacataccacgataccgatgataaccttgtcggctatgacgtagaagttgcgcagaacatcgcagaaaagctcggcgtagaggtcaactttgtcgagggcgagtgggacggcctgcttgccggtcttgatgacggtcgttatgacatcatggtcaacggcgtaggcgtcacggaagagcgcgcggaaaagtacaacttctctaccccgtatgcatataaccgcaccgctgttatcgtgcgcggcgattacgatgagattaactccatggaagatctcgagggcaaaacgaccgccaataccatttccagcacctacgcaacgcaggcagaagcccacggcgcaacggtcacgggcgtggacgacctcaaccagaccatcgagcttctgctctccggccgtatcgatgcgaccctgaacgcagaagtcgtattcgcagactacgtaaaggagcacccggaagcgaacatcaagattgctacgttctccgatgaagtcgaaaaggtcgccattccgatccgcaagggcgacgacaccgcaacgctgctcgcagccgttaacgacgcgctgaaggaaatgagcgaggacggcacccttaccgctctctccgaaaaatacttcggcaccgacatctccaaagagtaatttaaagtaaattcagcaaaacaaagctcctacccgcgtttcactgcggacaggggctttttgcatataggaaacgctccgtttctgtgataacccacaaaagtgtatattttcgttgtaatcccccgtgatgtggtataaatgaagcaagctgcggcgtaaaagaggggcgagcataaaacacacagcgaatccgaaagtcccgcttttaaagcgccgcacggtaagcggtttcctgttcacgattgctgcggtcaacttcgtttatgtaatcaacaatgtccatgaaaaccgcctgtccatgctcaaaaacaaacaaatttcgattacaaatccgccatttttcaataatcggtagaatatccccgaaacgcttgacttttcgtcctaaattgcttatgctatattctgttgctgtacgcccatttgtgcagcacggtcagtcgtgacatcctgaccttaaacaaaactagcgcggccggggcggctcccggaccgcggaaaggaatgctgaaatgaataagaaaacctcaaaagtccgctttctggcgctcagcgccgtgattgcggcgctgtatgctgtcctcacttacgccgctgccgccatgaatctggcgtttggcgcggtgcagttccgcttttcggaagccttaacggtgctcccggcctttacgccggccgccattcccgggcttgccgtcggctgcctcatctcgaaccttgcaagtccgctcggcgtcgtagactgggtgttcggcacgcttgcaacgctgctcgcgggcattttttcttaccttgtacgcaacattcgctggaaggagatcccggttttggcgccgctgccgccggtcattttcaacgccatcatcgtcggctttgaagtggcttgccttgcggataacggcacgtttgctttcggcaatctctcccttgcaggcttcatcgcgggtgccgtttcggtcggcatcggcgagctcatcgtctgctatgtgctcggcgtgccgctgatgatggcgctgcgccgcacgaagatcagcgaactcatgttggcgtaaatctgttccgggcacgcccggagaaagtcggtcggagtttatgaaaacgagcagattacaaaaaatagtaaagcgtacgtcacccacgcgcatgttcgtcgtcagctttttgatacttatttttatcggcaccgtgttgctcacgctgccgatctcggcgaaaagcgggcggttcacaaaccctgtggacgcgcttttcacggcgacctccgccacgtgtgtcacgggcctttccgtgtatgacacgtttatacactggtcgtatttcgggcagggcgttctgcttgtgctcattcagtgcggcggtctcggccttgccgcgtttgcaacgggtctcacgctgctcgtccgccgccgcatcggcattcgccaccttgtactcgcccgcgaaagcgccggcggcagcaatttggatgtcatctcgctgctgcgcatcgtggttgcgtttacgtttgcggtggaagctctcggcgcgcttctgctcatggttcgcttcgtgccgctttatggcgggctcggcgcatgggcctcggtgttcgtctccgtctcggcgttctgcaacgccggcttcgatattttaagcttcatccccggcaattcgagtttatcggcctttaacggcgacccgctcgtcacgctgacgatttccacgcttatcatcatcggctccacgggctttgtggtgtttcaggatatttaccgcaagaaaatctcgacgcgcctgcaccggcagcatgtggaaaagctgagctttcacgcgcaggtctgcctgcgtgcatctttgacgcttctggttttcggtacggtgatgctgtttatccttgagtacaacaatacgtaccgtgatttaaacttctttgaaaagctgaacgcggcgttttttcagtcggtgaacacgcgcacggcgggctttgcttccgtcagcattaagcaggaaacggatggtgcaaagctcctcacgtcgttcttgatgttcatcggcggctgcccgggctccacggcgggcggcattaaggtgacgacgcttgtggtgctgtttgcggcggtgaaatccactctttgcggcgaagacaccactacgttcctacgccaccgttttgaccccggtatggtgtataagtcccttacggtcgtggcgttcgcccttgtggtctccgttttgaacgtgagtcttattttagcgctgcaccacggtgtttccatattggatgcgatgatcgaagccgtttccgcctttgcgacggtcggcctcagcgcaagcctgaccccgacgctgcatccgcttgcaaagcttgccctgacgctgacgatgttcatcggtcgcgtaggccctgtctcattcggtgtggcgattttaatgcgcaaaaagaaaagcggttccgttctgccggagggcagaatgctgatcgggtgattttggatcctctgtgcgttttgcacaggggatctttgctttcatcgcgcacattttaagcccgtttccttgcgaaacagggggaaagtatggtatactattttgtacgtattttgtgtgctgtttaggcttcctaaatgcgtttcaatgcggcaatttacgattttgatataggagtgatttcaatttgtctcagaagacggaacagaaaggacagagctttctaaagggtaccgcaattttgacggcagcgacgtttatcgtcaaattcatcaatatatttttctctattccacttgcgaatttcctcgatgatgagggcatggggcatttcaacacggcgtatgacatttttgtatttttcagtgttttggcatcttccggcacaccggtcgccatttcgcgccttgtcagcgtggcgtatgcacagaaccgcaagcgcgaagcggataaaattttccgcgtggcattcacactgttctccggcatcggtcttgtcggctgcatcgtcatggcggtgttttcccgtcagttcgcgatgctcatgaaccaaaatgaccgctccatgtacgccattgcagccttggcaccgatgtgctttttcatgtccctttcgtcgtgtttgcgcggctatttccaagggcgttccaacatgacgccgacggcggtctcgcaggttttggagtcgctcattaaactgttcgtcggtattgcgctggcactgtatttcctgaagaccaccggcttgccggagcttggcgcggcaggcgcgatcctcggtgtttccatcggctcgttcttcgcagttttgtacattcttctgtactacttccgcaaatcgcgcgatacgcgctattcaccttttgagccgaaggtttcgagtgttggtgaaattttgaaatctatcctgacctttgcggtgccggtcatcatcggctctgcgtttttgagcgcgctcgacattgtggattcctccgtgatgatgtatcgtttgcagggcgctgccggtgtggacgcgaactccgccatcgctatgaagggctggctcggcacggcgcgcaagtatttcgacctgccgaacgccgtcatcgtgcccatctctaccatcgtgctgccgatgctttccggtgcgatcgcaaaaaaagaaaagcgcgaaatcaaccgtatttccacgctctccctgcgcatgacactcatggtagccatcccgtctgccgcgggcttgtgcatttttgcaaaacccatttgctccctgttgctttacagccgcccggagtttgcggcaaataccgcgccgctgctcgccgttatggcaccggcggtcatcacggcgagcttactttacactacgaactcgatgattcaggcagtcggcaaggtatacgtgccggtcatcaacatgattgtcggtacggtggtacgcatcggcgttgtgtatgtgctgtgcggtattccggagatcaacgccatgggctctgctgtcggtacgttcgtttcgtatcttgttatgattattctgaatcttatcgcgctgcaccgtatgctgccggaaattccgagcgtggtgcgcatgggcattcgtccactccttgcttctgtcattatgggcgcggtctcgtaccccgtatatctgctgctcacgcgctttatgagtgagaagttcgcggtcattccggttattctgcttgcaatcctcgtttacctcgtggcggcggtgtttaccaaagccatcacgcgcgaggagatcgtgcagctgccgaagggtgaaaaactggcggataaactgcatttgaagtaacttcctgtcttgtaaaggccatgtgcctgtgataaaataaaattataagtttttggggaatttcgcggtgcggaaaacgattttgcgccgacgaaagaaaggatgggtattgtggaagcaactgtgacaaataaaggcaaaaagggtcttatacgccgttttgcgccgtactttaaaaagtatctgtggatcctcattttcgacctgttctgcgcggcgctgacgaccgtatgcgagctggcgctgccaatcatcgtgcagcagattacgaaccgcggcatcaatgacctggcgtctttgacgctcagttatattctgcgcatcggagggctgtacattttcttaaagcttgtcgacgtgggcgcgacgttcttcatggcgtctatcggccacatcatgggcacaaagatcgagaccgacatgcgccgcgacatgttcgcacacctgcagaagctctcgttctcgtattttgacaacacgaagatcggtcagctcatgtcccgcatcacgactgacctgtttgacatcacggagtttgcgcatcactgtccggaggaatttttcattgcgggcatcaagatcatcggcgcatttgtgattttgtgcacgatgagtgtgccgctgacgctgattatctttgcggtgctgccgtttatgctggcggctgccatgttcttcaataagagaatgcaggcgcagttccgcagccagcgccaacagctcggcgagatcaacgcgcaggtggaagacagcctgcttggcgtgcgcgtggtgaaatccttcgcgaacgagccgcttgaagaaaagaagtttgaagagggcaaccagcgcttttacaacatcaagcgtctgcgctacatgtatatgggcggctttgaagcctccaataaattctttgacggtctcatgtatatcgtggtcgtcattgcgggcgccatcttcatgatgaacggcgccatcgacccctcgcagcttgtggcgtaccttttgtatatcacaacgctcatcaattccattcaccgtatcgtgcagtttacggagcagttccaaagcggcatgagcggcgtggagcgcttctttcaggttatggacgcgcccatcgagatcagcgacgcgccggacgccaaagacatcggcattgtcaagggcgacgtgacgttcgaccacgtaagcttcaagtataacgacgacggcaccgaggtgctttctgacatcgacctcgacgtaaaggcgggcgagaacatcgcgcttgtcggcccttcgggcggcggtaaaacgacgctgtgcaacctcattccgcgtttttacgatacgactgccggcaccatccgcatcgacggcaaggatatccgtacggtgacgctgaaatccctgcgcgaccgcatcggctttgtgcagcaggacgtgtacctgttctccggctcggtgtttgagaacattcagtacggcaagccgggcgcgtcgaaagaagaagtcattgcggcctccaaaatggcgggcgcgcatgaatttatcgaggggctttcaaacggctacgatacatacgtcggcgagcgcggcgtgaagctttccggcggccagaagcaacgcatttccattgcgcgtgcgtttttaaagaacccgccgattttgattttagacgaagcgacgagtgcgctcgataacgaaagcgagcgtatcgtgcaggcgtcgcttgaaaagctcgcgaagggcagaacgacgttcacgattgcgcaccgtttgacgaccatcaagaacgcgacgaaaattctggtgctgacggataagggcattgaagaagccggtacgcatcaggagcttatgaagaaaaagggcatttactttgacttatataaaagctatcaggaaatgacggcggacacggaataaagcccaaaggaaattttcgggtatgtatattttgaaaggacgggaaaactatgaaaacagtgacactcggcaataccggcatcacggtcaatcgcaacggcttcggcgcgctgcccattcagcgcatttccgttgaagaagcgggcaagctgctgcgcaaagcatacgataacggcatccgctttttcgacaccgcacgcgcgtattcggatagcgaatataagatcggtcaggcacttgccgatgtgcgcgacgacatcatcatcgcgacgaaaacggcctcgacaaccgttgaaggcttttggaaagacctcgagacgagcctttctatgctgaagaccgaccacgtggatatttaccagttccacacgccgtccttctgcccgaagcccggcgacggtacaggcctttatgaggcgatgctggaagcgaaagcgcagggcaagatccgtcacatcggcatcacgaatcatcgcctgcatgtggcgcgcgaagccgtggaatccggcttgtatgaaacgctgcagttcccgttctgctaccttgcgagcgaaaaggacattgagctcgtgaacctatgtaaggagaagaacgtcggcttcatctgcatgaaggcgctttccggcggtctcatcacgcgcagcgatgcggcgtatgcgtaccttgcgcagtatgagaacacgttgcccatttggggtgtacagcgcgagaaagagcttgacgagtttctttcctacaatgataacccgccggtgatgacggacgagcttgcggcgttcatcgaaaaagagcacgagtccctcgcgggcgatttctgccgcggctgcggctactgcatgccatgtcccgccggtattgagatcaatcagtgcgcgcgcatgtcgcttatgctgcgccgcgctccgtccgccgcatggctgacgcccgagtggcaggcgaaaatggagctgattgaaaactgcaagcactgcggccagtgcatgaagaaatgtccgtataccttaaacacccccgaattgctccgcaagaatctggaggattatcgcacctttttaaaataaaggagaaagttccgaattatgacagcaaacgaattttacgcgtctctttccggcaagcgcatcacgtttgtcggcgtggggcgctccaatctgccgctcattgagcagtttaaagcccacggtgcagccgtttcggtgcgcgataagcgcagcgaagcggcgctgggcgaagacggcgaagcgctgaaaaagctcggcgcaaagcttatctgcggcgaagactaccttgaaagtatcgacgaagacatgctgttccgcgcgcccggcgtgccgtatctgctgcccgagctgcaaaaggcccgtgcaaacggtgttgccgtgacgagcgaaatggaagtctttttcgacctgtgtccgtgcaaaatttacgccgtgacgggcagcgacggcaagacgaccacaacgtccgtcattgccgaaatgctgaaagcggcaggcaaaaccgtgcacctcggcggcaacatcggccgcccgcttctgccggagatccgtgatgtaaagcccgaggatgtggcggtggtggagctttcgagcttccagctcatctccatgcgccgcagcccgaatgtcgcggtcatcacgaatctgtcgccgaaccacctcgacgtgcacaaggatatggacgagtacgtgaacgcaaagaagaacgtacttttgcaccagaatgcgttcggccgcacggttttgaacgcggataacgccctgacggcggcctgtgccgctgacacgcgcggcatgacgtacatgttctcccgcagagagaagacgaacggcgcgtggtgcagcgcggacggcaaaatctacttcggcgacgaatatattatggaggaaagcgacattcgcattcccggcaagcacaacgtcgaaaactaccttgcggcgatttctgccgtgtggggcgatgcctcgaaagaggttatcaggactgtcgcgaaagaattcaacggcgtcgagcaccgcatggagttcgtgcgcgagctggacggcgtgagatggtataacgactccatcgcaacgagtccgtcccgcgcaatgatcggcacgctttcgctgtatgatttcaagatcgttatgattgcgggcggtgcggataaaaaggtgccgtttgacgagctgggcaaggtcatttgtgacaaggtgaagacactcgtgctgctcgcgcccgaaaaaccgcttgagggctttaaaacgccggccgcggggaagatcgaagctgcggtgcgcggtgccgaaaactataaggacggcgcgccggtgattctgcacgcaaacaacatgaaagatgccgtgcgccttgcaagagaaagtgcagagccgggcgatgtggtatctctgtgccccgccgcaacgggctttgatatgtacaagagctttgccgtgcgcggtgatatttacagagaagaagtgaaagcactgaagtaagcaaaaactgacgtgaaagcggacgcaaaagtctttgattaaactttcttcagaaagtttatcagattccaaaggtgaaacctttggtcgagctccgcagagctcggaaaaatttatttgtctcggcactgtgcataacagtagctcggcgagaaagatcaacaaaacaagaaatttgcgcactcggcgccgcttcgccttggaccgggcggggcgtgattgtggaagattggataggtataatgaaacagtataacaagggaaatgacagaaacaagggctttcagggcagaaacggtcgttccgaccgccgccgcgacattcgcgatacgcccctgaaccgcatggaagagacgattttggcgaccatgcgcagcgaggaaattcacgactggagcgcacgccagcttttgaaaaagacaggtgtgctcgacaagcttgctttttacgatgcactgcgttctttaaaagaccgccgcatgattttacttgatcgcgagcacaacgcgaagcttattccggtcggcgaagacgtggaagcgacgctcgtttcgctctcgaagaacttcggctttgcgcgccccgatggcggcggtgacgacatttttattcacggcagcgctttgcagggggcgctcgtcggcgacaagatcatcgtcggcgacattcgcaaggacgaccgcggcccctccggccgtgtgcgccgcatcgtagagcacaagcccgcgcagacgaccggcacggtgagtatcaccgatgagggcattgagttcatcccggacaatgccattcgctataatttacgtatgcgcgagcgcgatttgaacggcgcgaaaaacggcgacaaggtcatggcatctttggagcaggattaccgcggtgactgggcatatgcaagcgtgaagaaggtcttcggcagcggccgcacggcgcgtgtctgcgccgacgccattgtagagcagtacggcattccgcatgttttcccgcaggaagtgctcgatgaagccgagcgcatcggcaacgagcccatcagcgacgaagaatacgcaaagcgccttgacctgcgcggcgagccaatcttcaccatcgacagcaaggatgcaaaggacctcgacgacgccatctccgtgaagcgcacggacttcggttacacactgggcgtgcatattgcggacgtttcccactatgtgaaagagggctctgccatcgatgaagaggcgatcaaccgcggcacgtctgtgtattttgccgaccgcgtgattccgatgctgccggaagtgctttcaaacggcgcgtgctccctgaacgcgggcacggacaagctggccttctccgcgcttatcgagctcgacaaagagggccacatcacaaagtacgattttaaaaagacgatcatcaattccaaggtgcgcggtgtgtacagcgaggtcaacgaaattctggacggcacggcatcggaggagattttgaacaaatacgcgcccgtcatggagtccttgatgtcggcgaaggagcttgccgatattttgaaggcgaactccgcagcccgcggcaccatggagctggacagcggcgaatcgaaattcattcttgatgaaaacggcatttgtatcgacatcatgccgcgcgtttccggtgaagcggagcagctcatcgagcagatgatggtgacggcgaacattgcggcggcgaaattctcgctcgaccataaattgccgttcctctaccgtgtgcacggcaccccggacccgaagcgcgtagaggagcttgtgacgctgttgcagctcgtgggcgttccgtgcaaggagatcgtaaagccgaaccccgaaacgcaggatttcgccgcaatccttgaccgcgtgcgcggtctgccgtgcgagacgcttgtttctcagcgtttgctgcgcacgatggaaaaagcgagatattcgacggaggagaccggccactttggcctcgcgctttccgattacagccactacacttcgccgatccgccgttacccggatacatccattcaccgcgtgctttccgcatttgtggaaggcatgccggcagaagaggtgcgccgccgctacgcgcagttctgcgagacctctgcgacggaatcctcccgcaatgaaattcgcgcgctcatcgccgagcgtgacgccgaggactgctacatggcagagtacatgagtcagcacatcggcgagcactttgaaggcaccgtgagcggtgtgacgatgcgcggcgtgtttgtgcgcctcgaaaacagcgtagagggctttgtttcgctcgacgcattcgaggacgaggattttgtgtacgacggccttatcacacagcgcagtccgaagcgtgaattgaccatcggcacgccgctgccgatcatcgtggcttccgcctacgttgcgaccggcaaggtagacttcgtgccggataaagagaagctcgacatttaaggtatgaaaaattcccctgcatcataagcttttccgacaggataaaaatgggggagagcgtatgcggggaatcaaaaggctcatcggctcggcaatgctgggcgttctggcgctggtggttttgtattttacggcgccgtacaccggagtgtatattcccgtcagccggctcagcgtggcggtatccgctgtgcttggcgtgccgggcgtgacgctgctcgttttgctgagcctgctgtaaacgtatagatgtattgaaaagaaaactgcggttttgccgcagcggagaggagtttttaacatgtttctgatcaacgcaaacgtactggacgacaaattctgcctgcgcaaggcggatatcgagatcgaagacggcaagatcgtgcgccttgaggattctttgccgtacaaagaggaagacctcgttgtggactgcgcgggctacaccattgtgccgggctttgtggacgttcacgtgcacggcggcgcgggtgcagattccagcgacggcgacgcagagggtctgcgcaatatggcgaagttcctgctgacgaagggtgtcacgtccttctgcccgaccacgatgaccgtttccgatgcggagatcttgaaagcgcttgagacgattcgctcctgcatggacgacaaggaaggcgcgaagattgtcggcgtgaacctcgagggcccgttcatctcgccgaagaaaaagggcgcgcaaggcgacgagttcattcaggcgccggattacgatgtgtttaagaagtattacgattcctgcggcggcatcatcaagcttgtggacattgcgcccgagtgcgacgtgcgcggcgattttgtagagaaagcctcgaagctctgcaccgtttccattgcgcacaccgcaacggattacgacggcgcggttgacgcgttcaaaaagggcgtaacccatgcgacgcacctgtataacgcgatgtccggctttgcacaccgtgcaccgggtgtcgtgggcgcggtgttcgacaacgaaaacgtctgcggtgagctcatctgtgacggcatccacattcacccggctgtggtgcgcacgacgtttaagctcatgccggagcgcgtgtgcgtcatcagcgacgcgatgcgtttgagcggcgtggaagacggcggccaaggcatgctgggtgtgaatatggtcaccgtaaaggacggcaaggcgacattgccggacggcaccattgcaggctctgttacaaacctgcacgcggaactcaagaacctcgtttcctggggcattccgctggagaccgccgtgcgcgccatgacgctgaccccggcgaaggagatcggcatggaaaacgagatcggcagccttgcacccggcaagcgcgcagaccttgttgtgctcgatgagaacctcgagattgtcgcggtctaccactgatgcttttgcctttgccgtgcggccttgacggcggggcatgaggatagaattagggaagaacagaaaggaaagaaaatatgtattgcacaaattgcggaagaaagctccccgaagacggctcgccgtgtgtttgccggcggcagcccgcacagcccgagcagcagacgtacacacagccggtgcagccgcagcaaaactacggcgcacccacgcagaattttcagatgccgccgcagtattacgcgcagccgccggtgcaatacccggtgcagcgaccgattacacccgtgcacggtgtgctgaaaagctttttcgcgtctccgctgttccttattacggcgatcctcttttcggcgaatttgctgtttcagatcatcgcaagcctgttcccgcaggatccggcgtatattgtaaatcagatttacagcaacctgccgtatgaaatgcagtttatcatttcgccgggcgacctgtacagtgcgctttcggatgcgcagagcggcaccacagtcggtacggtcatcggtatgcttatcacaggaggtttaatggctgccgcgtactggatcacgtacatatctgcgaaaagcccgagtgttccggcggcaaaaacggccggcctcaccatcatgaaggtgttcagcatcatcagtcttgttgtgatgagccttgcggaggtgctgtgcgttgttcttgccgtgatcttcggtgttgcccttgccggcaatgactacggctacatggatgagatgatgagcgttatctttggcattctcattgcggcctgtatcatcggctttgtcgtgctcatttttgagatcatttacgaagcaaaggtcataaagatgctgaacagcgcgaagaacgcgatgctgacgggcatgattccgaataaggcttccatgtttgtggcggtcatctgcttcatttcggcggcggtgtcgttcttctccgttttcggcgatgcggtgctgtacggctggatccgtgttccgctcggcctgacgagcgttgcgctcaacgtgctttatggtctgcttgttctgcagtttaataagatgctgaagaacgcaggcatggctcgataaaacaaaataagtgaacgcgacccgctcccggccgcggcgggacggtgtagttccgctgcgcggaagcgggttttgtgttacgcaaaaggaggttcggttatgtattgcacgaattgcgggaggaagctcccggaggacggttcgccttgcatttgcggggcgcagaacgggaatttcaacacgcagccgccgcagaattttcaggcgccgccgcagtattacgcgcagctgcccgtgcgtccggtcacgccggtacacgggatattaaaacggtttgcgtcgtcaaagctgtttttcatgtgcgcgctgctttttacggtgcagatggtcgtgtcggcggtctcatcggtgattgaggtgttcacggtgctgcaaaatcaagcgtatctgctggaacgcacgcccgtaggcacgaatttcaacgtagagtttaacgtaaacattgtgcccgttcaaaatattctggtgcttatcgggctttggctgctgtacgcctccgcgaagaaggcggacacgccgttcatgagcacagcgggcgtcacgctgtttaaagtgacggaaattctccagatcgttgggtgcggtattttttgcgggatgttgctgctcatcggccttttggtgctcctcgcatcgagtggcgccccgaacgtgacaaattacaccggcttgccggacaatattgctattttgatagtgggtattgcttttgtggtcggtttggtgttgagcgttctgctgcttttgtacagcatcaaaatgctcggcgtgtggacgagcctgcagcgcgcgatacaggtgggcgtgctgccgaaaaggctgccggggtacgcgctcgctttgcagggattttcgattttctgtgatgtcgccgcgatgattgcgtttttcgtgttgaacgcgtggatcctcattccgggtagcctgtgcagcatagccgcgcgagtatatgtcatccgctgtatggcggcgtataaccgggagattgcggggatggaagcgggttctttctaattggaatctgacaagattttgagaaagccagagcaaaacttttaactaccgttgctgcaggctgcgaaaaatctttacaaatctttttccgtgcgctacaataggggaaagattgttttgaaatggggttttatagatggtgaagattcccgaaaattatacgccgagccttggcctttacgagacgcagaaggcaatcggtctgatcaagaacgtatttctcgtcaaaatttgtgcggcgctgcatttaaagcgcgtcaccgcgccgctgttcgtcgacccctctacgggtctgaatgacgacttaaacggtgtggagcgcccggtcgagtttgacattccggcagtcggcggcaacgcgcaggtggtgcattctcttgcaaagtggaagcgccttgcgttgcatgattacggcttttacgtgggcaacggccttgtggcggacatgaacgccattcgccgcgacgaggagctcgacaaccttcactccatctatgtggaccagtgggactgggagaaggtcatcgaccgtgacacgcgcaatatggcgtacctggaagacacggtgcgccgcatcgtcagcgccatctgcggcacgctggacgaattaaagtggcagttctccggcctttccaccgagctttgccgcgacgtgtatttcatcacggcgcaggagcttgaggaccgctacccggacctcaccccgaagcagcgcgagaacgtcatcgtgcgcgagcaccgcacggtattcattgagcagatcggcggcgtgctcaaaagcggcaagccgcacgacggccgcgcgccggactacgatgactggagcatgaacggcgacctgctgttctggcacgagccgcttggcatggcgctggaaatcagcagcatgggcatccgcgtggacgaaaattcgcttgcggcgcagcttaaaattgcgggctgcgaagcgcgcgcggagctgccgttccacaaaatgcttttaaacggcgagctgccgctcaccatcggcggcggcatcgggcagtcgcgcctttgtatgcttctgctcggcaaagtacatatcggcgaggtgcaagcttccctctgggacgaggagactcgccgcgtctgtgccgaaaagggcgttatcctgctgtaattgtgcttgaagctgaataaaacggaagccctctgctgcggttcctttgcagcagagggccttttctatgccgaaaaaatctataaagacggaaaagtgttttaacgttcgcagagttcagctgaatttttaaccgacaaagaggtatgctcagcacttcgtccacttcatcaaaagcgattttggcaggatatgcgctaagaagcggtagaacttataaaatccgcccatgatgcaggcgcttttgccttttaatccggctttcagggcgcaggccgccatttttgcgggcgactggtgcggcagcatgtcgagcgtgcggcttttatgcgtggggcggtcggcaacctgccagaattccgtaatcatcgggccggggcacacggcaaggacgttgatctttttgggctttaattcctcgcgcagcgcgcgggagaagctttgcacatacgcctttgtggagcagtacactgccatgcgcggtgtgggcgcaaacgacgcgatggacgagatgttcaggataagcccgcccgttttcatatacggcaggctgtaccgcgtgacggcggtcagtgcgcggcagttcaaatcgatcatcgtggtctggctttcgacgtcgcttgccgcaaaatcgcacagcttgccaaagcccgcgttattgatgagcagtgaaatttccggcttttcgcgttcaagcaaagcgttaaattgttttaatgcggcggagtcggtgaggtcgagcgcgatggggcgcagatttttttccgggaactgcggctttaaagcttccaagcggtcttcgcggcgagcgatgagccaataggtgtcgatctccgggcaaagggtgacagcggcgcgtaaaaactcgatgccaagtcctgaggaagcgcctgtgatcacggcgattttcatagtgactgtcctttcaaaattttccgatggttgtgtctccattctaccgctgcttcagctgcctgtcaaacgcctttttggacaatttgtaaattcgcgcgaaaaaacgcaaaaaacggtataaattttcgtgaaagtgtggtacaatgacaataattactgtgatgcgtacgcaccgtgtacgcagaaaggacgcatacatgacaaatcaaagaaaaagcatgcgctttataggctgtctgctggcagttttcatgctggcagttgttttttgtctgccggctttggcggacagcgcatcatcgaacacatacacgatcccggacacgaacatgaccgtcacaatccccgagggcgcgacggtgctttccgtcgataccccggcgggcgatgccgcgtggagcaaggcgggcattttggacgcgagcgagaagatcaaggaaatgcagaaaaacgggaccacggcggagattgttgcggcaaacggcgataccatagccgtagcggagaaatcttccgattacgcgaactccgtttttaacctcaataatctggatgaaaagggcaagaaggattttttgaaatacatggagccgtcttccatggacggcagcacgaccggcaccatcacgtggtacgaccacgcacagattccgttctttatgatcgacatctgtgcggagaatatcaaggaggagggacccgtgtacgagcgcctctatggtacgctgtacgacggcaagattgtttcgtttgacctcttcggcgatacgaaacaaatctcggaggagacggacgcattcatgcgcgccgtggtcgattccgccgtcatctcagcctttgcggaagcacctacgattgaaaacggtttgagcagacagagcgctgtgacgctcggcgcagtgggcgtgctcattgtgttgctcatcgtttactttgtgacggcgcacagccgcaacaagcgtgaaaagcagcttagaaaagagacggcggatcgccttgcggaataccgccgctcgaagcaggacgacgaatccgtcggtacgggcgcgttgcgttttgtaaacgagaccgaccacgacgacgcggcaatcaagatgttcgcgaactatcaggcgtatcacttgcaaattttcatgccggtgttcaccgtgattttaagcgtcatcgcgctgtacgtcgtgtggcagctcggcaatttcgacagcaactggtgggtcatgctactgcttatcggctttgcgatttacagcctttataagcttgcgacggcttccaccaacacggcaaaggtgcttatgcgctcctacggtaagctgcgcagccgccgcgccgcgtactatttctacgatggcgacttccgcatcacgggtttacaggcttctaacctgcacccgtatttccagatcagccgcatgtatgagacgaatgaatatttctatatgtatttcggcgagggcaatacgtactttatccgcaaggacggctttaagcagggagacgccgatgcgttccgcacctttatgaaggaaaagctcggcaagcgctttaagtaaaagcaacaaataaacaacaaaataataggaacgcgcaacaaatgaaaatcgaccgcgcgggttttatgcggtataatggggggcgctttgaaagcagccccgaaagagaggatttcttacatgatcggtattatcggagcgatggagattgaggtcgcgggcattaccgcggcgctgacagaccataaaacggaaacgctgtgcggcgttacattccacacgggcaagctgaacggcacggacgttgtcgccgcaaaatgcggcgtgggcaaagtgaacgcggccatgtgcacggcggcgatgatcctcaactacgcgccgtccgtcgtcatcaacacgggcgttgcgggcggcatcggcgagggcgtgaagatcggtaatatggtcgttgcgtcccacaccgtgcagtacgattacgacaccaccgccatcggcgagccgaaaggctttgtaatgattggcagtgagggcgttgtgcagctgccgacgagcgcgaagcacaatgcggtgctcgaaaagtacgccgagaagatctacaacggcgtgcacacgggcgtcattgcgaccggcgaccgttttgtggcggatcccgccttctgtttgcagctgaaagccgagttcggcgcaatctcctgcgagatggagaccggcgctgtggcacaggtgtgcgcggtgaataaaacgccgttctgcggtctgcgtgccatctccgataacgcgaacgacgagggcagcgtcgattttgagacgtttgcaaaatcctctgcggaaaagtgcatcgagcttttgaaagatgctgtgggtgagctgaacgaagtgcagtaagacagtttggtttagagcgaaaggaaagaatgtatgcagaacaaatatcttgccatgaccccgccaatgggttggaattcatggaacacctttacatggaacatcaacgaagacctcgtgtgcggcgcagcagacgctctgtgcgcaagcggccttaaagataaaggctatgagtacgtcgtcatcgacgattgctggagcctcaagcagcgcgacgaaaacggccgccttgtgccggatccggagaagttcccgcacggcatgaaggctgtggcggactatgtacactcgaagggcctcaagttcggcatgtactcctgctgcggcacgcacacctgcgcgggctacccgggcagctttgagcatgagttcgtagacgccgagacgtttgcttcctggggcgtcgattaccttaagtacgacaactgctataaaccgaagcacatggacggcgaagtgctctacaagcgcatgtcccttgcgctgcgcaactgcggcagagacattgtgctttccgcctgcaactggggcaacgaagacgtgcacagctggatcagaagctccggcgcacagctgttccgctccacgggcgatattcaggataactgggaatctgtaaagaacctgttcctctctcagctcgataagacggcgttcagcggcccgtactgccacaacgacattgacatgctcatcgtcggtatgcacggctccagcaacaacgagttcatcggcaacatcggctcctgctccgacctcgaataccgctcgcacttcgcactgtgggccgtcatgggctccccgctgatgattggctgcgacgtgcgcaatatgaccgatgtgacgcttgaaacgctcggcaacgaagacctcatccgcatcaaccaggatatcgagtgccgcgcgccgtactgcatccgccagtggaacaacccggagaacgtcatggcgctcgtaaaacccctttccgacggttctcttgccatctgcttcgtaaacttcggcgataaaaagagcgaaatgtccctgcaattctgggatatgggcatctcttatgcggagaacatcggcctctccttctacaactgctatacaaagcaggatgagggcaagttcgccgagcgctacgtggcgcaggtggagccgcatgacaccatggtgttcattgcaaagcccgtgaagctgaaataatggcaaactacaaaacctgccgcacctgcggcgcaccgctccacgatgacgacatcgccatttaccgcaagctcgtctaccgcggcgcggaggactttttgtgcatacagtgccttgcggattatttcaagtgcccgaaagaggaaattgaaaagcgcatccgctattaccgcgaaagcggcgtgtgcacgctgttccgctgattctatcccgtaaattaacaccgccggaggatttttttgccttccggcggttcggcgttttcatttataagaaatccatttcgcaaaaaggagataccactatggccgataccatatctgtcagtatcatcatcacgtttgcagcagagctgctgttttcgcttgcgctgcccatccttgcccttgtcatctggaaaaagaaagagggcacagagctccgcccggcgtggatcggcgcggcagcctactttgtgttcggcatggtgctggagcagctcatcaatgccgctgtgctcggcacgggcagctccgccgtttccgcgttcctgctcggtcacccgtggctttacgccgtgtacggcggtctttcggccggcattctggaggagaccgcacgcttcctcgtatatagaacgatgctgaaggacagcgtaggccgcgaaaacgctgttacgttcggcatcggcttcggcgggctcgagtgcatcatggtgctgggcctcacggtgctctctacgctcataatgtctatctcgttcaataacatgggagcagaggcgtttgccgcgcagtatgcgaactcggagtaccagatcgtccttgagaccatcgcggagatcaacgccattagccctcttgccggcgtgatgaactgcgtggagcgcaccgcggtgttcgcactgcaaattgagctttccgttttgatgttcggcgcggtgcgttcgcagaaattctggctgtaccccgtcagcatcctgctgcacgcggttgttggcttcctcgcagcgctgtatcagacgaacgtgcttacctccgtctatcttttggaggtgctgctcgttgtgtacgccgtggcagtctttttcctcgcgcgcaaggtctacggtgagctgcccatggaaaaaccgcgtgagcttgaccatttcggcagagtgattaagcgcaaatgagtttagaggctacggcaaagtccttgtgcgcgcggcgctgaccgaagccaaaaacgcgggcaaaggcatcgagctcgacgtcgattccgaaaacctgtccgccttaaatttataccgctctttcggctttgcgccgacctttgaagtggaatactggcgtgtgtccgtgcacgattgcctgtaaaaaatggcccccgcactctcgtgtgttaacgagaatgcgggggcgtttaaattcaacttattgcacaaaaagccgcacttttcctgtgatgccgctcgcgggcagtgtcatatacgtcgaaaagaaatcctgcatacgctgtgcaagcgtgttgcagacgaacacttctacgtcgttttcgcccgcttttacggcttccgtaatatcccagcggtacgggcggcagatgcgctgccccatgtccttgccgtttacgaacagctgtgccgttacgccgacgttttcaaattcaagctctacgtgtgccgtatcgtttatattgagctttgtcttataccgcatttcgccggaaaactccgtttcaccgtttttgcccgtgatgttaaaaagcttcgagtttttacggaacggcttgaattccgtctccttgcccgtctcacgcaggtcaatgtcccacagcgtctcaatctccgccatatgcagaccctcggatttctccggaaagcctgcccattcatcttccgtagcgccgccgaaaatgaggatcaccgattgccccgcttcaagtgcgagcccgactgtgccgtctgccgtctcgccacgcgtatagacgccgtttaacagatccgccgcgatgtatttgccgctgacgggcagcgaaagcgtctcctgtaccgcgttcggcgcttcgttgaagacaaagaagcttgtcgcttcgccgcgcgtgaactttgcaatgcgcagcaggtgctcctttgcgttatattcgtgcgcgagtccgctttctttgatgtgctctgcaagcttttgaagcggcacgatctcattttcactgatattcacgcagtccggtgcgtaatcgacaaagaataccggcacgcctgcgtttttgagcgcttcgcagatttttgcaaagcgctccggcagctttctgcacgccggcacgacgaggtatttgtacccgcgtccaaagcgtccgttgttcttttccgccgtttccagataatcgagcggcacgatgtcgtaggaaatctgcgcgtcatagcacgcttttgcaggcttttgcgtcagcatggcgcttgatttgtccatccactccgcttccgcgtggtataaaattgcgccggaggcttccatctctgtgccgtacagatagtgcgccgcgcggttcacgtagtgcatcagctgcgtgaagcccgcaaactgcgggtcgttgccgtctgcgccaaagtgcggcggacagtcgcggtcggggaagaaatcgtcaaatgcgtgcggcacaaagtggtttacgccgcgcacaagcaggaagtccatcaaccatttcatgacgttcgcgccttctgcccaaccgtatgcgccgaacacctcgcacatggcgcggctgttcatgttcggattttgccgcgcgtgcgaagccgcaagctgccccaaaacgtagtggcagaattcgccgtccaccatgccgcccgagacgagcgccgccgttttgtagtcggccatgccgggcattacctggtgcagcacaatgtctatgccactcatgtcctgcccgtcgagcccgcggaagtaatgtcccgcactgcacccaagacgcgcgtgcgcgttcatgtcttcaatcaaatgcccaatgtattgcacaccgtgtgcacggcaccaatcgccgagcggataggagaaattctctttccaaagcaacgtcacggcgtccatgtatgcaaggcgaatttccgcggtcagctcgtcatgtgcataccacaaaatcggcagatagagcgtcggctcgtcgatgccgtcttttgccatgtgcacggcggccgcgtcgcgccacggcagcatcacgccgggctggccaaccgaacgattataaatgccggtgtcgtaccccgtcatgccaaagtgcggcgcgtcaaagcccggctcatcggagaaaaatcccgcgagcgtgttgccgaaatactttgcatagtggtcgtaatgcggctcgtacacggcttcaatgagcttgtgcaccgattcttttgagagcatgtcgatatagtgctttttgttttcttcgccgctgaacgtctcaaacacgaaaaatacgcggtaaagcccctcgggcacactgaaatatacgaatttatcctccggctgcacgtcaagctcaatcggttcgccggtcagctcttcatctttgcccgtgcggcggaacagcacggcagaaacgagcttttcctccggcgtgtgcattggcaccaagacggacgcttccgccatgggccccatcacgtccacatgcgattcccgcaggaattttcgacgcaggttcaggtcttcgtgttctaaaataccgtttgcgtagcctgtcgggaaatgcttatcgtcgagaatccacacgcgcatgccgcgcttttcggcttccgccaaaataatgtccatcgtcttccaccacgcgtcctcgcagaagtgttcatacgggcgcgattccacacaaaatgcgcggcagccgctctcatagatcttctgcacgcgtgcgggaatctccgcgtcgtgcccgtcgtgctgccagaaaaacggcagcaggtagttttctgttttattttccaatatacttttcaaaattggttccatttaaattcccccaaaagagttttacaaataaagctgtatcgacgccatcgcgtacacggcgaggtaatataggatcagcgcaccgtttttctgtgtgcccgtaatgccgcagatgaaatcccgcgcaacgaacaagtccgaaatgcagaacgccgctgcacccaacgcgaacagtatccactgcgtcgagacggcaaacggcaacgtgcccgccatagctgtcatgaacgaaagcacgagcggatacagcaccatcgggagcaacatagagccaagcgaatgcagatattgccggaaaatcagcgcaatgatgccgtaaataatcaaagccgcaacgaccgtgccccaccgaaacccgccgagctgtgcaatatacccgataagcacaaggtgcgcgagtccgaacgagatcacgccgaagcgaaaatcgcgctcgatgacaaaatccgcgatgcagcagaataaaagcgccaaagcgagcagccacgcgttcgccgggcgattaaacaacacgataccgagcaccgctgtgatgaccgctacaaacgttgcgccgcactttgcggctgagcgccacatcgtgctgccgaacgagcgcgtggcattatagatgtaacagaacgagagcatcatcggcaatgagatgagtggccaaagcacacgaaacacgcgcataaaaacgcctccttttccacaattataacaaacgtccccgcaaaatcaagcaaaataaaagccgtcggcagaggatcggcaaaatccactgtcggcggcgtgttgacttgtcaaatattacccatgaaagccgtagttgatgcaccagaagacgcacacaacggcaagcacgatgcattgcacgatgagcaaagcacgggaaatggtgcgcttattgatgccggagttcggggagaagctccaaacggcagccatgataagtcccaaaaccggaacgagctggatgaggaacatcatcacgcactcggaaacggaaagcgcaatggtgttttccggcagatattccacggcgcggccgggtctggaggaagcctgcacagcattatcatacaaaaccggtgttacgccctggttataaactgttgcgcagggggtctcgatatcggaacgaattctttccgggtctctcggctgtatattttttgtataggtttcattgagcatcataaaaggtctcctccttataaaactgacggttcaagtaaaaagtgtttttatctcgcggacatatttccgcatctcttcctgtatacagaataacatgaaaatggcattttatcaagtattatctaaaaaaatgtaaagtttattgcgctgcttacgctttaaatgcttaaattgttcacagcatatacgcaatttgtccgcgatgtgaatacactttgcaacttgataaacccggtaattcatgctattttaaaattgaccttattatacggcaatttttgagaaagaaggaaaaaatatgcagctttgcagtgtaaaagctccatgcgaagtctgaccccgggcgggtccgcatggagcgcttagccgcccgcagactttgcatttttaacacgaattttttatttttgttaaggaagagcatagtctcatgcaatttcattttaaaaatttcaaaaaaagttttctgcattcaaattttccccgaagctttgggataaatccgcgcgcacagcattaggcctgtttctgcgcctgtggtcttcgcagccgttttccgtgctcggcagctctatgacaagctttgcgctcgtcatttgggcgtatgagcaaagcggctcggcgctcagcaccgtcggcgtactcgttttgctcagtaccgatgcgctctgcgtgtggtgcgtgggcgcggtgctcggctggctgcccattccgctgatgaacgccaacttagacgtgctgttccgcacccacattcccgtgaagatgcagggccgcgtttacgccgcgcgcaattcgctgcaatttttcaccattccgcttgagtatctccttggtggcgcgctcgtagatatcgtcttcgagccgttcatggcagcgtaaacacccgaaagccttttctgctgcctgttcggcaccggcaaaggctccggcgccgcgtttttgttccttgtcctcggctttctcggcgtcgccgtttgcctctgcttccgccgcagcaagcttatccgcgggctggaagcgaacgacaaagattaaaaagctgaaccaaaccacgaatacagaatatttcaagtacgattcgtaatgtgtatggcgatttagccggaattgaaaataagatgcactgagaagtacgattttatcaaaaaagtcttggcgactgtttgcagctcctgctgcgtcgccaagacttttctttatgcttttaaagcttaataataccgaatgaccgcgataaccttgccgagaatggtgatttcatcggagatgatgggctcgaaatccgggttttcgggctggagacggaacgtgcccttctccttatagaagcgtttcacggtggcttcatcgccgatcatgccgaccacgatctctccgttttccgccacgggcgttttctctgcgatgacatagtcgccgtccagaatgccggcgttgatcatgctcaggccgtccacgtgcagcgcgaaaagctccttgccgcttttgtccgggtagggaatatagccctcaatgtcttccacggccagaatgggcagaccggccgtcaccttgccgagaatcggcacctgctttgcggcagatgcgcctacaatgtgaatggagcgattcaggcccgcatcgcgtgtgatatagccgagcgcctccaaagatttcaagtgggaatgcaccgtagaggtggagcgcaaaccggtcgccgcgcagatctcacgcacagagggcggcacggcacgttccgccatggtggagcaaagatagtcatatacaagctgctggcttttcgttaaactcgccatatgcgattcctccgttttaatacaaaatcagtcccgtagaaatgggcagttctttaattaaaaccattgtatcatatattttcaaaaaatgcaaacgattgtttgctttttctgcggattttctcgaaaaaagcgttcataaatgcgttccaaaatctttaacgtttattcatggctatttaacaactctttttgaaaccgcggtataatataagcgtattcagaagaaaaggaaccgcacctttcttggatacatgttctaccctcctcaatatacccctcaagctaaaaggaagaaggaccgagccgcatcggtccttcttccttttgtatgatggtattttcagcgcggagaagtgccaattttgcacagcattgaaactgaaagtatccgtctgccgaaatccgcggaccgaagtatagttgcatatttttctcaaactcgcccatactacgggtaaagaaacccaatgacgctaaaaacaggagagagaaatatggctatgcactttaaaaagcaggaaaaaaccgaagcggagcgcaaaaagagtacggagcggcgcgggttttaccttgcgcttgccgtgtgtctgacggccatcggcattgcggcgtggagcacatacgataccgtttccgggttcttggagcccacagggagcgagagcagtgcgtcttccgccgcgtccacaccgcgccccacgcctgaaacatccgtccccgtagacgatgacccggagagcgccgtttctgcgggccacgcgcagggcactgtgccggaggtctccgcaagcacagaagcggagccgcaggaagtgaacgctcctgcagaagaaacgcccgtcgaagagaccgctgccgagccgacgtatacggtcagcgaaacgcttacccgaccggtgccgggggaggtcatgacggagttttccgatacgccggtatactccgaaacgatgcgcgactaccgtgtacacgcgggcacggattacaccgcggcgcacggcgaaactgtgcacgcctgcgcaaacggaatcgtaaaagagacgcatacggacatgctgcgcgggaatatgattgtgatagagcacggcgattacgaagtgcactattgcggactcggtgaaacgttcctcgtgcatgagggcgatgtcgtcacggccgggcaggacatcggcagcgtgaccgccgcgccgtttgagtccgcgctcgattcccacctgcatatcgaagtcaccagaaacggcgagccagtagacccggaatctgtcttcggttaaaattgagccaaactgcccccggcatcgttttaggggcgcgcagcctcggtgtaaaaatgcaccggggctgctttttgctgctcaaaaatactttgctgtttacaatttgttccttgatttttctggcttctcgttctataatatagttcaaaatagaacgaaagtaagtgagtatatgatcttttgggagcggcaaaaatctcttacggcgttttacgaagcgtgcacaaagccggtgcgtgatgcatacgacctgacgcagatgcaattcaatattttaatgttcctgcacaataacccgcagtttgatacggcgggcgatttagtcaaaacgcgccacctcacaaaatcgcacgtttcaacagcgttaaaggaacttgaagcgcgcgggtggattgaagcgcattacgttacgggcaaccgcaaaagtcaacatttacgcatcacgaaaagcgccgaagccgtcatcgcggcgggaaaagcggcgcaggaggtgttcggcaagcagctttttaagggcttcacgccgggagaaaccgagcagtacaaagtgctatttgacaaaatgtgcgaaaacgccgcagaaggcttagcggaaacggaaaggataaactgatatggagcttttagtcaaaatcctcgtctgctttttggcgggcgcgggcgcaggcatcggcacaggctttgcgggcatgagcgccgccgcggtcatcgggccaatgcttatgacgttcctcggcgtcccggcgtatcaggcggtcggcatcggccttgcaagcgatgtcttggccagcgccacaagcgcgtggacatataagaagcataaaaatcttgacgtcaaaaacagcctgccgctgctcatcagcgtgcttgttatgacattagtcggcagttttgtcgcaagtctcctgccggagcgcgccatgagcggcaccatgcagatcgccatgatcttcatcggcctgcgtttccttctaaagccggtcaaaacgaccaaagagcaaatggccgcggccacgccgaaggaacgcctcatcaaatccatcgtcggcggtgtcctcgtcgggtttatctgtggcttcgtcggcgcgggcggcggcatgatgctgctgttcgttttgacgtcgttcctcggctatgagatgcacatggcggttggcaccagtgtgttcatcatggcgttcactgcgctgaccggtggcatcagccacttcgccatcggcggcatgccggatgtcacatgcctcattctctgcgtcgttttcacgctcctttgggcgaagattgccgccgccatcgcaaaccgcgccagtgccgtcaccctgaaccgcgtcgtcggcatagtcatgatcctcaccagcatcgtgatcttgcttgtgaattatgtattttaataaatagtctcctccataaaaacgagacccccgaagcacgctttggcacttcgggggtctcgtctgtttaagctttaatactcataatgatgcgcttctttcagcatcatgtctttcaccttcatcaggcggatctgggtggagcgctcgttttcgtcaagcttcatcgtgatgtacttgatgttcgtctgcagctccgggatcatgacgtgctccagcgcgttgacgcgacggcgtgtcttttcaatctctgccgccatcaactggcaggatttttccacttccgccagcttcagcattttggggaagacctcggaaagcgaaaggatcgcgtcgtcaaggtcgccggtcgtaaaagcgaagccgtaggagtacatgtcgttccggtccggtgtacgcgtcttaaagtcaaaatccggaatctccacgctcatcacgttctgcgtgccggcggagatcgtcagttcctgcttcggcgcaagcagcgcggtgttcagcatttcgtccggcataccggcgcgcgccagcatgaagttctggttagcggagacgagcgccgtctccacttcttcgcgcagcgctttgttttcgcgcaccttatcgagaaactggcgcatcagctcgtcgcgcttatccttcagaagcttgtgcccgcgcacggcggtgacgagcttttttttcagccgcgtcagctccattctggtggggtttacctgggtgcctgccaccgcgcatcacacctttccgtaatactgatcgaggtacttgtcgtcgattcgcttcagttcgcttctgggcaagatggaaagcagcttccaaccgagctccagcgtgtcttcaatgtcgcggttcgtgttgtagccctgcgaaacatactcgttttcaaaggcgtccgcaaacttcgcgtacagcttatcgatctccgtcagcgcggcttcgccgaggatgaccatgagctcctttgcttctttaccgcgtgcgtaggcggcaaatagctggttcatggtgctcgcgtggtcggcacgggtcttgccctcgccgatgcccttatccttcaaacgggacagcgacggcagaacgtcgatcggcggcgcaatattcttgcggtacagctcacggctcagaatgatctgcccctcggtgatgtagcccgtaaggtccgggatcgggtgggtcttgtcgtcttccggcatggttaaaatcgggatcagtgtgatggaacccgtcttgccgttctggcggcctgcgcgctcgtacagggacgctaagtccgtgtacatatagcccgggtagccgcgacggcccggcacttccttacgtgcggcggagacctcacgcagcgcgtccgcgtagttcgtaatatccgtcatgatgacgagaacatggtagttcttttcaaaagcgaggtattccgcagcagtcagcgccatgcggggtgttgcgatacgctcaatggccgggtcgtttgcaaggtttacaaacatgaccgtgcggtcgatggcgcccgtctcgcggaagctttcgatgaagaagtttgattcctcgaacgtgatgcccatagccgcaaacacaacgacgaacgggtcgttcgtgccgcgcaccttagcctgacgtgcaatctgtgcggcaagctgggcatggggcagaccggaagcggagaagatcggcagcttctggccgcgcaccagcgtgttcagaccgtcgatggccgaaacaccggtctggatgaattcctgcgggtagttgcgggccgccgggttcatcggcagaccgttgatgtcgtcgcggcggtcgggcaaaatctccgggccgtcgtcaatggggcggccgaggccgtcgaaaatacggcccagcatgtcttcgcttacgcccaattccatcgttctgccgaggaagcgcacgcggctgttcgaaaggttgatgccggtggagctttcaaaaagctgcaccagcgcgttaccctcgttaatttccagcaccttgcagcggcgcttttcaccgtttgcaagttcaatttccgccagctcgtcatacgttacgttttcaacgccctttacgagcatcagaggacctgcgacctcctgtatggttctgtattcctttggcatcagaagtcctccttgttttcaatggctttgtcaatctgctgagagagctctgcgcagatcgcatcgtattccgcggagacccggtcgttcgccgtgtatttaaagcggcctattttttcgcgaacaggcagcgcgatgaggtcgtcgaccttcgcgcccttatcgagcgccgcaacgcactggtcgtagaagtgaacgaccagcagcatcatgtcgtgctgcttttcaaggcttgtgtacgtgtctgtctcatggaatgcgttctggtgcaggaagtcttcacgaatggagcgtgcagcctccagcttcaagcggtcaggcgcggaaagcgcgtccataccgacaagctttacaatttcctcaagctctgcttcgtcctgcaaaatgcgcatcaaacgcgcacgcagatccatccagtcctccgccacgttcgtgttgaaccagttcgccatcgtgtccacataaagggagtaggaggtcagccagttcacggcggggaagtggcgcttatacgcaaggtttgcatcaaggccccagaagaccttgacgatacgcagcgtcgcctgtgagaccggctccgaaatatcgccgcccggaggggaaacggcaccgataacggaaagcgcaccctcgcggctgtcgctgccgagcgtaatgacgcggccggcacgctcgtagaactgtgccagacggctgccgaggtacgccgggtagccttcttcgcccggcatctcttccagacggccggacatttcacgcagtgcctccgcccagcgggaggtggagtctgccatgagagctacggaatagcccatgtcacggaaatactccgcaatggtgatgccggtgtaaatggacgcctcacgcgccgcaaccggcatatccgacgtgtttgcgatgagcacggtgcgcttcatcagcgaatacccggttttcgggtcaacgagctccgggaactcgtttaaaacgtcggtcatctcgttgccgcgttcgccgcagccgatgtacacaacgatgtcggcttccgcccactttgcaagctgatgctgcacaacggtcttgccgctgccgaacggacccggtacggccgctacgccgccctttgcaatcgggaacagtgtatcgataacgcgctggccggtgatgagcggcatatccggcgaaagctttttctggtacggtctgccgcggcggacaggccacttctgcatcagcgatacgttcacactgctgccgttcggcgtgtcaatgaccgccacagtgtccgttacggtgtattcaccggcggaaatggagcggattgtgccgcgcacgcctgccggtaccataatcttgtgcagcacgatctcggtctcctgtacggtgccgagaatgtcgccgccttctacttcgtcgcccacctgtttaaggggcgtgaagctccattttacatcgcgctttaaggagggaacctccacgccgcgctttaagttgttgcccgtcatttccataatggcggtcagcgggcgctgaatgccgtcgtaaatggagctgataaggcccggcccgagctcaacgctcatcggctcgccggtggattccacaggcgcacccggcccgagaccggaggtctcctcgtaaacctgaatggaggcctcgtctccgtgaatttctatgatctcgccgatcagtcgctggtcgctgacgcgcacaacgtcgaacatgttcgcgtcgcgcataccgcctgcaactacgagcggaccggctacttttttgattgtgccttggctcatgtgcttagtcacccgtttcgttaatcgttgtcgttaaagataatatcggagccgactgcctgctccacggattttttaaccattttaatgcccatgcccgtgttgcccgtaacgccgggaatcgggatgatggcgggcagcggctgcaggcggaagtggtccagctcgtgctccagctcggcggcaagcgcttccgtaatgtagattacggcgtattcgccctccgctaagcggcgcagcgttttggagcccatctccgaatccgtcacgggaaagacctccagaccgagcgcggcaaagccgtaaatgctgtcgcggtctccgatgactgctgctctgtacatttcgtttccctctttctttacaggtctctcaaacgtgcacggatacgctcatccggcaggttgttctgcttgccggaaataataatgcgcacggtagaaatctcgttttggcgcgccgtaacatacccgagcagcggcgccaccgtaaagtaatcctggcggctgatttcttttacaagcgctgtctggcggtcgtcgcaccatttttcaaacgcggagaagccgtccttcagcgcctttacgccgtcagcatagtccgtacgggaaaggtacgcgtaaaacgtgtccgtgtctttcgacgccgcatcaatgagctcttccagatccagcgtgtcgcacggggcgaggctttcttccaaaaacgcacggcttttgccggtgtgcaaagcgcgtgccgcgattttaatgtccgccgccgccaccttaaactcggaaaacgccgtaatcagcgcatttttgctctctttaccggtcttgtggatcgccgtgaggcatgcgcggtctaaaatgatgtcgcaccgctgaccgtcgcgtgtggtaagcagcgcgtccgtcgccttttttgcggcttccgccataaagtccggcagaagggagaagtcattttctctgaccgcctgctgcattttttccggctccacggtgccgccggacataaacacgttgtgcggctccgcgtttgtgacggtgcacttcaccgccgctttcatattgttgaagtctatgggatacagcagtacgctgaacggcgtgaggtcgggcagcagctcgtgcatgagcgcccacgttttctcctcctcggcggcaaaaattgcctcggcagaggtttcgccgccagcgccccagcccttatcggccagtgcacggaagcactctgccggcgttttgcacgccatcagcctgtccagatcctgctgcgtcaaaagcgaaagctcccgcgctttaatgcgcgccacagcatagatgtattcctgttccattcgttaaaccaccttttccgccggcggctcagcgaaagagcatgccgcccgcaaggtcctgcaatgtgtctccggcggcctcaaacagcgaagcgaacgtgcagttcacgtcgatgccgccgtaaacgagcaggaaaccgtccgggatattgcacggcgtgttcgatacggtgatgttcgtcccgggcacagccattttcagctgcgccgaaaaatcctgcggcatgcgcgcaaggtctttttcgtttaactgcatttcagcatcgcccggcagcgcgtttttctgcgcaagctttaaaagcacgctgaagtattcgtcatccggcagatcgtgcaactctttctgtgccgccgcgattacatcgcgaatggcgttctgctttgcggcaagcacggtgcggcggcgtgtgaattccgcggtcgaagccgcacgggctttaatgtccgcgccgaccttttcactgcccgcaagcaggacatttgctttctgctctgcctcggcggcagcgtccgcaagcgtcttttttgcttcttcttccgcagcggcaacctgttccgccgctttcgcttcggcatccgcaaggatctgttctataattctgtccagtcctgttgccatggatcgatcctcttcctttctttttttgatttttgggagtggatcatcagatggcgatgccgccgatgtttgcaacagccagcagggaaacgagcagagccagaaccgcataagtctcaaccatggccgggaagatcatggctttaccgaactgatccgggcgctttgcaacgagtgcgatggaagaaacggctgcctttgcctgctgctttgcggagatgagaccgatcacggccatcggcatgcaggctgcaagatagagaaggccctttgcaaaggagatgtctgcgctgccgcccagaacaccgatgttcgtcagcgtgaggaaggcgatgagcaggccgtagatgccctgcgtacccggcagaagctgaagaataaggactttaccgaacagcgggggattttccgaaacgacgcctgcggctgcctgaccggtcatgcctacgccgatggcggaaccgatgccgccgagaagtgctgccagaactgcgccgacaagcgcgagaacaatgccgagagagttgatatcgaacttatccatgttatttttcctccgtaattttgaaatatttggttttggtggtgaacggtgcgaatttgcgtccgccgccctcaaagaatttgccgaagaactcaacaaactgtaagcggttcgtgtgcacatacgcgccgagcacattgatgccgatattcagcgtgtgtcccactacaaaggcgaaaataaagataatcacgccgagcgggttgttgccgggcatggcgcccatctgattgaagaccgaagcgataacgccggttgcaaggccgagagccaaaagtctcgagtaagagagaatgtcgcttaaatagctcgaaacaccgtacagcccgtaaagaccttttaagaagcgcttgccgatgctcttggagctgcggcccgaagtgagcacaatgcctaccgcgccgatgcctgccgcaataatgcccgcggtgcccaccgatgccggcagcgtaaaggaaagcgccaccatatcggcgaacatctgcatggaaagcagataaataatcgcgccgccgacgagcagataccagaacacaacgtcatagatcgcgtccagccacttgccctgctttgcaagctggtagaactgtgcgccgaggccggcgaacaggtggatgatgccgacgaggaacgagaacagcaacagccgcatcggttcatcgaccggcgtgaaccacaagggtggtatcacgatatcggtgttgaagaatgtctttgcgataacggtgatcgcgtcaccgaagaagctgccgaacaaaatgccccagaatatcgtggaaataccgcaatagaggaacatcgtcagcgtcttgcgcagaccttcttccatgtttttgaacttgtgtaagatgatgccgcagccaaggaccatcacaagtccgtagcccgcatcggaaagcatcatgccgaagagaaagtaatagaagaccgccatgatgccgcttgggtcgatttcatgcttgcccggcatgctgtagctttccagtacgccctcgaccggggcagcaaatttgttgtttttgagcttcacgggcacatcgtccgcgtcactcgggtcgcacagctccacgtaggcttcctgcgtggtttcgagctccgtcttaagcgcctcggcgttctctgccggaatgtatcccgtaatgagaaacacgtgcgggctctgccataagcggcccaaaacatcgtatttttcggtgcgcatcgtaaagtaatcgatggtgtaaagcaggtcttcgcgtcggtttttatgtgtgcgaatttccgcttcgttttcatcgatctctttttgcagcgctgcaatgcgtccgttcaggatgtccacgcgctctgcgggcggcaccttgctcggctccgccggatacgtaaacccgatggaacgcaggtaggtttcaagctttagtccctgcgagatgtggcacatcaaaaacgcgcatgtctgctgcggggaagcgctcaaaatctccacgaccacaccgtctacgtccggcgcgccttcggcgattttcgcccgcagcgtttcttccgtgtattccaccgggaacgaccccgtgaacacggaagttgtcggcgtactgatggtgcgcatggaaatatccagcttcatccacggtttcagcgcacggatttgtgtctgcaagcggagaatttccgcgcggttgtccgcacactttttccacagcgtgttgatgcgcgaggcaatttttaaaagctcgctcgcaccgtcagccgtttcctgatatttggaaagcggtatcgcgtcgcgtccgttcagagacgcgaagaggcttttttcgggcggctccagtttatcgagcgcgtctaacgccgattgcagcgcggctgcattgttttcaaatcttgattttgccgggacggtatccatcttggcaaaaaccgtttcatccgctttgcggtcatcgatttccacgacgccgcgccgctggatcagttccaggatctgtttacgacggttcttgagcgcataaatgctgatgcgcttcataggcattaccgccatagggggatcccctcctttcgtgttggcgccgcgtcagccggtgatggcctcgcggatagcgcggattacgttcgcgctgttttgctgcgcttttttgcggatatcctccgccagtgcggcagtttcctgctgcgctgtgcgttgttcggtcgcagcggccgtctctgcgctttgctttgcggctgcaaggtccgcttttgctttctgcatgcgctccgtcttcagcttgtccgccttttgtgcggcgtcctgccgaatggcggcgcagcgtgcagcggccgtgtccagaatgccggcggccttctgctccgcatcctttacggcgtccagagcttcttttgccaaaaaatcacctcctgcttcattattttcaaagagcggcggcaaaaggggtaaagacctgctttttgcgccgtaggtcataacataatacgcttccattataatattatttgcggaattttacaagagattttacaggagttttctcgaaaaagtgctttcatatcgataataaaatagacgttttgacgaattcgtctgccttttaacattccgtccataaatggatctttttcttcgtgtaacccgcacgttctcttacaagtttcttacaaaaattcacattctgtttatgattttttttgaatccgtgttataatagaaataatcacttaatatggataacgggccggtgcggcccgcgaacttacaggaggcagtcaaaatgaaagcaaagtcccttcacttttccaagagcggcaacgtacagccgatcgcatccgaaatcggcagagttatgcagtgcgtatgtgaccagattcccccggcatatccgtgcgagggcgagaaggtcgtttttatcggcgttgaaatgaacggcaagctcccgggcgcagtcgatcacttctgcaaggatctcaatcccaccagagcaaagggtgtcgcattctatgttctgaacagcaacggtaacacggacggtctttcttccatcatcgatacgatgaagaagaacggcgtcgagacctacggtgagcctctgggcatcgctgtcaagggcggcctcttcaagaagggcatgccgaccgacgcagacaccaagaaggttctcgagtgggcagacaagattgcaaagatgtaatttctttgataaaacagcctttataatttttcataaaaaaggatggcgcatgctgtcctttttttctgtttttacgggatatacaaaccccgcttgcggtggtaaactgtatgagaaatctttgaatgttatttttcccgtaaaggtgtgaaattttcagtatgacaaaagaaatgacgagcggttcgcccatgaagcttatcctcgggttctccatcccgctgcttttcggcaatctgttccagcagttctattccatggtcgataccatgatcgtcgggcgcgtgcttggcacggggccgcttgcggccgttggctccaccggctccatcacgttcctcatcatcggcttctgccttggcctttgcagcggctttgccatcccggtggcgcagcgcttcggcagcagggattataaagagcttcgccgcttcatcggcaacgccgtatggctgtgcgtcggcttcggcatcgtcttaacagtgctcacggtcattttctgccgcaatatcttagagttcatggacacgccggcggatatcatcgacgacgcttacgcgtaccttgttgtcatttttgccggcatccccgcaacgttcctctataatatgcttgccggcatccagcgcgctatcggcgacagccgcacgccggttgtcatcctcgtcatcgcgtccatcatcaatattgtgctcgatatcgtcctcgttgttttcatccccatgggcgtcgcaggcgcggcggtcgcaacggtcgcttcacaactcatcggcggcgttgtatgtctcctctatgtgagcaagcattatgaagtcctcaaaatgacccgcgaggatttcaaaatcaacgtgccgtgcatcaagcgccttttaagcatgggtctgcccatggcattgcagacatccatcacggctattggcagcgttattttacaggcatccgttaactccctcggctctacggtcgtcgccagcatcacagcgggcagcaggctctatatgttcttcgcctgcgcttatgatgccatgggcgttaccatgtctacatacagcgggcagaacatcggtgcgcgtaaaattgaccgtattgggcagggtgtcaaagcctgcaacatcgtcggcatcatctattccgttctggcactgctcatcatcgtgttcctcggcaaatggatgcttcttctgtttgtcgatgccggtgagactgccattatcaattctgcctattggtatcttgtgtgcagtggcctttttatgatcccgctgacatttgtcaatgtgctgcgccttaccattcagggcatggggtacagccgcctcgcgctctttgccggtgtgtttgagatgatcgcccgcggcggcgtgggtctgttcctcgtgccgctgttcggcttcaacgccgcctgcttctccggcccgatcgcatggatcttagccgatagcttcctcattcccatgtattaccacgtcatccaccgtgcaaaacgcggcgagggtatttactaaacagaaccaaaaccgtcctgcacgaacaaaatatgcagcacgaagagcttttagtctgctacccggagcattggtcccggctcgtcaaagccattatcgattgaattccaaagcagctgttttcgacaagcttaaaatcccgttcaccgaaagtgaacgagattttaagctttctgttattacgcgttctctttaagccactccaccgcacaatgcgccatgcacgccgcgccgatggggaggacgccctcgttgaagacgaccttcgggttgtgcgcagtgtactgtccgcgctcgtccatgtagcccgcgccaaggtacatcattgcgctcggcacacgttcggccacaagggcaaagtcttcggagcctgtcgccgaaatgccgccgtacggcgtaaagttcggaatgttcagcgcgcccatgtagcgcagcatgtcgtccgtcaccgatttgtcgcacacgagcgggcacacttcggaaagcgtccggatctccactgtcgcgttatacacggcagccgtgcgctccgccgtctcgcgcatgcggcgtacaagcagtgcgcgggcttttttgtcgttcgtgcggatggtgccgcgcagcacggccgtgttcgggatgatgttcgcggcggttccggccataaactgtccgattgtcaaaacgcacgtctttgtcgggtcgctttcgcgcgcgatgagctcctgcaaggcgagatgaatgtgcacgcctacgttgatggggtcaatggcaaggttcgggttcgcaccgtgcgagccgcgcccgtgaatcgtaatctcaaatccgtctacggaagccatcatcacgcccgagtcgttatacatcacaaagcccacgggcgatttacctgccgccacgtggtacgcgagcgccgtatcgaccggcggattttcaagcaatccgttttccagcatatcgcgcgcgccttcgaatgtctcctccgcgggctggaacatcaatttcaccgtgccgcaaagcgcgtcttcgttttctttcagcattttcgccgccgtcagcagcatcgccgtgtgcatatcgtgtccgcaggcatgagccgtttcgccggtggggcaggcaaacggctcgccgctctcctccggcatcggcagcgcgtccatgtcggcgcgcagcaaaagcgttttgccgggcttgccgagtgtcgctgtcacgccatgtccgcattctgtcggctttaggccgtattcgcgcagcttttccgtcacaaacgcctttgtgttcggtaggttcaaccccacctcggcattctgatgaatacgcctgcggttttggatgatctcgtctttcaattcctgcgcccgtttccaaaagtccatagtctcgtccccttttaaaaaattttgtaagcaaaaaggcagcatgaagcaatacccatgctgcctttattttatgatttactcagcggaagattcagaagaagtctcactcgtctcggaagaagtttcggaagattccgcactgctctcctcggaagaagcgctttcgtcgctgctttcggaagcgacggaagatgtgccgttcttcttggtatccgcaaacatggagggcttgtagcggttcagtaccttctggttccattccacgccctcaaagctctgtgcagccgcgctgacagcatcggcgtattcggtgttcttcagctcaagcaaaagctgcgagcggctgtcactgctctccagcagcgtatcttcgtcgtccttgatcggcagacggtgcagaacgatcatgtactttgtcgattccacgacctccacgtcgccttcgttcatctccttaatcgcagagatgaacgcgtccggcatgtagcttgactgcataccgttttcgtccttgatgccggtctggtaggtggagtcctgctgtactttgagcgcatagtccgttgcggcgtcgtttacggtcattgcaccggattcgatcttcgtcttgtatttttccagcgtctccttgaggtcagccttttcctcgtcggtcaggtcaacagatttattgtcatcgtccgtcttcgtcagcggcgcagagaaatactcgtagtcgtagtaatcgtcctcaatgtgctggcgcagctcgctttccggcacttcgttttcgccgccttcgccgtacagcgcgttgaagaccttaaggtacattctgttatactgggaatacgcaatgtcaaaggaggtttttgcgatgccgaacttttcaaagctcgtgccgaagtagttccagtagctctcggtggtctggaggcatgtgctgtaatcctcgtcggtcatttcaaggcccagacgcttcatttcgttctgaatatagaaatactggttcacatactcgtccgcgcggtttttgatccacgtctcggccggcgtgccgtcgatttcggacttcaagacctcgtcttcggtagagaccttggaagccgcttcattgtacgcaatggagaggtagtaaatgtatgcgccggcaggcagctcggtgtcgtcgtactttgcggaccagttcagatcctcatcgtagcagcccgcaaggctgaagcacatggcaacggccaaaagcagcgccacggtaatctttgcgattcttttcatggtgtttgttccgtacctttcttaaatattgcggacaaaatgcccacaaaggtttgctgttgttcattataccgccgatacggcaaaatgtccagttattttgtagcgggtttcggcggtttcgcgtcctcatcgccgcagagaactttcaaaacgtcctccaaaacggtgagcggtgccttgccgcccagcgccacgctgatgtacgggcggctgccggcggagagcatcaccttgttcggcatgccctgaatgaggcgcttcacgcgctccatgtcaaacttatctttgtagagcagaagcgcgtttgcctgctgcttgacttccgtaatgccaagctgtgtcgcgcggttgcgcagcaaagcaatatcaataagcccataaacgctttcgggcggctcgccgaagcggtcaatgagctcatccacaacatcgctcgaatcttcatacgttttaatgtctgcgatgcggcggtaaacatccaaacgcagcgcggtggaatcgatgtagctttccgggatatgcgcctgcacctgcatgtccacggtgcattcctccacggggttctcgggcgcttcgcctttcatcatggccacggcttcgtttaagagcttcaagtacatgtcatagcccacgctttccatgtgcccgtgctgctcgccaccgaggatattgcctgcgccgcgaatctcgaggtcgcgcatcgcaatcttaaagccggagccgaactccgtaaattcgcgtatcgccgccaaacgcttctgcgaaatttcactcaaaaccttgccgcgtgtaaacgtaaagtacgcgtaagcgcggcgggtgctgcggcccacgcgtccgcgcagctggtgcagctgcgaaagtcccatgcggtcggcgttgtcgatgatcagggtgttcgcgtttggcacgtccacgcccgtctcaatgatcgtcgtgcagacgagcacgtcaatttcatgctccatcaaacgccgccagacttcggagagctcttgctcgctcattttgccgtggccgatgccgatcctcgcctccggcacgcgctcgcgaatacccgccgccacgcgctcaatcgatgctacatcgttgtgcaggtaatacacctgcccgccacggcgcagttcttttttgatggcgtcggagatgacgcccgggtcatattccatcacgtatgtctgcaccgggtgacggtcgtgcggcgcttcttcaatgacggacatatcgcgtataccggaaagcgccatgttcaaggtgcgcgggatcggcgttgcggaaagcgtcagaatatcggcagatttacacacgtctttcagccgttctttctgctgcacgccgaagcgctgctcctcgtcgatgatgacaaggccgaggtctttaaactgcacgtctttcgagaccagtcggtgtgtgccgacgatgaggtcaatgctgccgcgtctcagctttctcagaatttcgtcctgctgacgcggcgtgcggaagcgggagagcagctccacatccacggggaagccctccatacgctttaaaacggtttggtagtgctgccacgccaaaatcgtcgtcggcaccaagatggcgcactgcttgccggcggtgatgcacttaaacgccgcgcgcaaggcaacctccgtcttgccgaagcccacatcgccgcacagcagtctgtccatcggcgcttcacgctccatgtcgtttttaatctcgttgatgcagcgcagctggtcgtccgtttcgttgtattcaaagtgcgcctcaaaatcgtgctgccactcgttgtcttcggggaacgcaaagcccttctgtttcatgcgttgagcgtataaaacaataagctcctttgcgatgtcctttacggcggcgcgtacgcgcgctttcgatttctgccattccgtgccgccaaggcggtgcagctttacgccggagtcctcacgcggaccgatgtatttcgcaactaaatcgagctgtgtcaccggcacatataaggtgtcgtttttcgcgtaccgcagcttgatgtagtccttcgtgatgccctgcatgtcgattttgtggatgccctcaaaaatgccgatgccgtgcgttgcgtgcactacataatcgccgggggtcagctcggcaaggctgtaaacggccttgctgtttttgtccttttttttcgctttcggttggctgcccgcgctcatgcgcccgtgcgtgatgagcgtaaatttcgcgttcgggtattcaaagcctgcggaaagcgtacccgccacaacggccaccgtgcccggcgtgatggcggaaaggctctcaaaatagcccgcaggcagtccggcggcctttaaatctgccgccacgttcatcgcggcgcgctccgtgccggctaaaacagcacaggcatgccggttgtgcagcgcagccgtcaggtcttcggccaaaagctgcgtgctgccgccccaaacggaaagctgccgcaccgtcatgttcacaagcgcctttgtcggcgtgtcgtaagagccgcgtgcaaacgcgtccatataaacgctcgccgtgtcctccgcgcgctttaaggcgtattcatacgtctcggtatacatgtcaagcccgcggcacagcacgccctccgcgagcagtccgcgtacgtcctcgccccactgccacagcgttgtgcgcatgcgttcctttagtttcgagccttcggagaacaccagcagcgcatccgtgtcaaaataatcgaacagcgttgcgacggtctcgtaaacgaacatgtaatatttgtccatgcacccaatgtgcaggtcgtttttcagtttatccgcctcgcgcagcagcacttcctttgcggcaggcgccgccttgccgcgcagcgtttttgcgtgtgcctcgagtttctttgcaaggatactcatgctgtccggcacgacctctacggcaggggagatggtcacttccgtgatctggtcggtacggcgctgcgtctccgcgtcaaaatacgagatggtgtcgatctcgtcgccccagaattccacacgcaccggtgcttttccgccgggggagtagaagtccacaatgccgccgcggcgcgcaaactgacccgtgccgtcaatctgatcggcgcgcacatagccacagcgcaccagcgcccgcacaatctcatccaccgaaatttcctgtccggcagagagtttcaccgtgcgctctttcagcttttttggcggcagaacatactgcaatgccgcgtcgatcgtcgtcacaatgcaggtgcactgcccggtttgcagcagcgtcagtgcttcgatgcgctggcgctcatattcgtgcgagctgccctccgtgtcgcgcaggctgaaatcgcgcagggggtaaaacgcagaagtcacgcccatcgcgttcaggtcttccagcatacgcgtcgcttccgcttcgtcgcccgcaataaacagcgcttttttcgacatggcagaaagcagcgtgtgcagaatatttgccttgtgaatggaagccaaacccgtcacggccaccggcgtcttgcgctgccgcacagcgttttcgatcgcgcggtattccggcacgcgcccgagcgcgtcattcaaaaaattcatacgcatagtagtgttcctttcggggagccgctcaggaattatagcggttcatcgccttgtccggcgcgccggagaggagcagctccacagcgcccgttacgttttcggaaacggtttttagcgttttcatctcgtcatttgtaaagcgggagagtacccagtccgcaaggtcccaaccttcgggcttgctgcctacaccgatcttcatgcgcgggaacaggtcgctgccgctcagataaatgatattcttcatgccgttgtgcccgcctgcactgccctttaagcggatgcgcgtgcgcccaacgtcaagcgaaatgtcgtcgaatacaatcagcgtgcgctccggcggaatatgaaagaagttcatcgcctccgtcacggactgtccgctcaaattcataaaggtggagggctttaagagcacggcgttctgtcccgcaatggtgcccttgccgtaaaggcccttgaatttcacgcggcgcacctcaatgttaaagtgctccgcgatggcgtccagcattaaaaaaccggcgttgtggcgtgtcatctcatatttcgggcccgggttgccgagtcccacgatcagccagtccgcgccgcccgaagtttgatcgtttttagaaaaaagcttcatggaatgttcctttttacatcaatgtttttgtcttctttttcgcaccgcccgttttcggggatgccgaaaggcacgcagaagccgcacagccgccgaaagggggagacccttcgccgctgcgcttttctctgcgtgtgtgtttgcgggcatgcccgcttttcaaatatattatattatgccacccgcaaaagggttttgcaagcctattttgtccgaaaacgcgggaaaacccgccttaaaaaatcgttttgcggcgcaaaaatctgtctaaaagaaaaattctgcgaaaaatttccgaaaacagacgatttctcgaaaaaaggtatggaaattcgcaaatatatttggtataatagagtgcggcgaaacagtgaataagttttttatgcctttttcgccggaaaaatcagttaatactcggtttaaccgtgtaaattttcaaggaggtagtttccaatgagcaaaaagtatgtctatttgttcacagaaggcaacgcgagcatgcgcgagcttctcggcggtaagggcgcaaaccttgctgagatgacgaacctcggcctgcccgttccgcagggcttcaccatttccaccgaagcctgcacccagtattacgaagacggccgccgcatcaacgatgagatccaggctgaaattatggagtacattgaaaagatggagcagatcaccggcaagaagttcggcgatcaggagaacccgcttctcgtttccgtccgttccggtgcacgcgcatccatgcctggcatgatggataccatcctcaacctcggcctcaacgaggacgttgttgaagttatggctaagaagtccggcaacccgcgctgggcttatgactgctacagaagatttatccagatgtattccgacgtcgttatggaagtcggcaagaagtacttcgagcagctcatcgacgcgatgaaggctaagaagggcgtaacgcaggacgttgagctgaccgctgacgacctgaaggagctcgcaaatcagtttaaggctgagtataaggaaaagatcggcgaggacttcccgtacgatccgaaggaacagctcatgggcgctatcaaggctgttttccgttcctgggacaacccgcgtgcaaacgtctaccgccgcgacaacgatatcccgtattcctggggtaccgctgttaacgtgcagatgatggcattcggcaacatgggcgagacctccggcaccggcgttgcgtttacccgtaacccgtccaccggcgaaaaggttctcaccggtgagttcctcatgaacgcacagggcgaagacgttgttgcaggtgtccgcaccccgcagcacatcgaccagctcaaggaagtcatgccggaagtttacgagcagttcgtaggcatctgcaacacccttgaaaatcattacagagacatgcaggacatggagttcaccatcgaggacaagcacctctacatgctccagacccgtaacggcaagagaacgccggctgctgctctgaagatcgcttgcgacctcatcgacgaaggcatgatcgacgagaagcaggctgttctcatgatcgagccgagaaacctcgacgctctgctgcacccgcagttcgacgttaaggctcttaaggctgctaccccggtcgctaaggctctggctgcatctcccggtgctgcttgcggcaagatcgtcttcaccgctgaagatgcaaaggtttggaacgagaagggcgaaaaggtcgtcctcgttcgccttgagacctccccggaggacatcgaaggcatgaaggctgcacagggcatcctcaccgttcgcggcggcatgacctcccacgcagctgttgttgcgcgtggcatgggcacctgctgtgtttccggttgctccgctatcaccatggatgaagagaacaagaagttcgagctcgccggtaagacctaccacgagggcgactgcatctccatcgatggttccaccggcaacatctacgacggcctcatcccgaccgttccggcttccgtcaattccggcgacttcggccgcattatgggtctcgcggacaagttccgtcagatgaaggttcgtacgaatgccgataccccgcagaacgctatcgatgcaaagcgcctcggcgcagaaggcatcggcctctgccgtaccgagcacatgttcttcgatccggacagaatcgcagctatccgcgagatgatctgcgctgacaccgtcgaaggcagaaagactgctcttgctaagctcgagccgatgcagcagggcgactttgagaagctctacgagaccatggaaggcgagccggttaacatccgtttcctcgatccgccgctgcatgagttcgttccgactgaagaagctgacatcgagctgctggctaagtccaccggcaagactgtcgagcaggttaaggcaatcatcgccggcctccacgagttcaacccgatgatgggtcaccgtggctgccgtctggctgtcacctatccggaaatcgcagagatgcagacctccgcagttatcaaggctgcgctgaatgtctccgctaagcatccggattggaacatcgttccggaaatcatgatcccgctcgttggcgaagtcaaggagctggcatatgttaagagtgttgtcactgcaacggctgataagctcatcgcagaggcaggctcttccatgacttacaaggtcggcaccatgatcgagatcccgagagctgctctgacggctgacgagatcgcgaaggaagcagagtacttctccttcggtacgaacgaccttactcagatgaccttcggcttcagccgtgacgacgcaggcaagttcctcggcgcttactatgataagaagatctacgagaacgatccgttcgcaaagctcgaccaggtcggcgtaggcaagctcgttaagatggcttgcgagctcggcaagtccacccgcccggacatcaagcttggtatctgcggcgagcacggcggcgacccgacttccgtcgagttctgccacaacgttggcctcacctacgtttcctgctctccgttccgtgtaccgatcgctcgtcttgctgcggctcaggctgctatccgcaatccgcgccagtaaaaagttgacgcagtagcgtaggcaaaacaaccgatataaatacggtcacacagtccttttggattgtgtgaccgttattttttttgcccattttcagctgaatacaccgtaaatcaagccgctggtttcactatgaatcagcggcttctttgatttcctcatcggtgaacataaaacttcttacttatcctctttctcttaatcttccggtctatcgcagagttcaccgctctgcgaaattttcgaaccacggtttgtaaggccacggttcttttggtttgaaaaacgcgtcatcacaggcataaatcattatataaaaaccgcacattccctgtcgaatgtgcggaatataaagacagccccgatgcgttctgaaatgcccccaaaaagtctggaaagggagacaccggagaaattcggtgtttttcgcatttttcgggaaaattgtgtaaagttttctttacttctctgagttaaagtagtatactaatacgtatatattcgaaaagtgcggcagtttggcttttggggtatagcaggtattttacggaggagtgtataggactatggagaaaaaaacaagcaatttttccggacagctcggctttgtgctggcggcggccggcagcgcggtgggcgtgggcaatttgtggcgctttccgtaccttgcggcaaaggacggcggcggactgttcctcatcatttatctggtgttggtgctgacgttcggctttacgctgctgacttccgacattgcgattggcagaaagacgcagaaaagtgccatcggcgcatatgaggagatgcacccgaagtggaagttccttggtgtgctgacgtttttggttccggtgctcatcatgacgtattacgcggtcatcggcggctggatcacgaagtacgcgtgcgtgtatctgacggggcaggcttcgagcgcggcgcaggacgactactttacgtcgtttatcacgtcgccggtgtcgcctgtggtgttcggcctgctgtttatggcggtgacagcgttcattgtgtataagggcgttgagggcggcattgagaaggtatcgaaattcatgatgccggtgctgctggttcttgttgttattattgcgatttactcgctgacgttaaagcacgaggacgcggacggcaacgtgcgcacgggtttacagggcttcctctactacatcaccccgcactttgaggggctgaccgtggagcgctttttgcagattttgctcgatgcaatgagccagctgttcttctcgctgagcgtttcgatgggcattatgatcacctacggctcgtatgtgaagccggaggttgacctcaacaaatccgtttcgcagatcgagtttttcgacaccggcgtggcgctgcttgcaggcgtgatgatcattccggcggtattcgtgttctccggcacggacggcatgggcgtaggcccgagcttgatgtttgtgtctttgcctaaggtgtttgatgcgatgggcccggcgggcacggtggtcggtgtgctgttcttcatctccgcaatttttgcgacgctgacctcctgcatttcggttttggagtctatcgttgcgaactgtatggagatcttccacacggacagaaagaagacgacgcttgtgctggcgctgatttacctcgcagcttccgcggtgatcgcgctcgggtacagcgtgttctacttcaacgtgacgctgccgaacggctcgagcgcacagcttctggacattatggactatgtcagcaacagcgttatgatgccgttgatcgcgctgctttccaccattttgatcggctgggtgaaatcgccgaaatatgtggcggacgagatggagcgcggagggtataagttccgccgcaagcgtatgtattacgtgatgatccgctacgtagcgcctgtgatgatgctggtgctgttcttacagtctacgggcttgctttcgatgatatttaagtaaatttatcggtgaatttccgcgagagcggtttaaggcagtgccgtgcggagttttgcggcgttgctttgctattttaaaaatgaaaggtgatacttatgaaatttcccgaaatgctgaccggtgtgcagcacatcggcgtgccgacgaacgatttggaaaagaccgttgcgttttacgagaccatcggttttcagccggttttagagaccgtaaacgaggcggcgaacgagcgcgtgacatttttgcagctcaaaaatttagtcattgagacgtatgagaaccacgcggcggtggggaatcccggcgccatcgaccacattgcgctcgacacgacggatgttgaagcggcgttcgcagcggcgaaggaagcggggcttacgatgctcgacgacgagattcacgggctgccgttttgggcgaacggcgtgaagtttttcaccgtggaaggtccgaacggtgaaaaagtggagttctgtcagaaattgtaagcgataattagaatatagaatttaggcggctgaactgcgttttcggatgcggttcggccgccttttttgctgcccgaaggggccggatttcggggagatacaagcgttgcaagcaaagtgcaagtttactgcaaaagatttgcaaaaatcgagacagggcagggtgagtctggtataattggggcagaaaggggcggtgtggccgccaaaggagtgtatggaaatgaaaaaactgattttagtgactttggtgctttgcatggcgttatcggcatgcacgaaggcggaagtggggaaagcgccgactgcggagagcgcggcggcttcttccgtggaaagcaccgcgagcggcgggaagagtgcggcgagtgaagtctcattgccggaaaagccgaagacggcggcgcatgtgacgaagacgttatcctccggcgttgtggtggacgcagacgtgactatgccggaatcgatgcagaaaacggagctgccggagatgaagggcacggggcacgaggtggcgcacgaggggctaagcgaggtgtttttcggtggggcagaggtggaatcgaccgtgacagaaatagcggataacggttatttttcttctaacacgatgctcgagctttggcaagtgggagacacggtgctgtcggctgtaggcacgacagtggcgtactcaaacggacgagaggtgacggcgatgcacctcttttcggaatacgcgagctctttgccgttcggcgacaaccgcgccgtgtatttgacagggaagaacctcgactttgcgacgatagacgaagtgaaagaaaaaatgcgtgcatatattgacgcgctgggggtctctgttttggagccgacctgctacacgatggactatgacacgatgcgggacgtgtatgacgggcgcacggcgcttgagacgtatgacgcggactttgactttgtgatggagccgacgaaggaagacgagcagtatgtgctggaatacccgcttgcggtgaacggcatgccgtttggcagctttgacggcggcagttacagcggggacgcgtgggcgacggggacctcggtgaaggtgttttacggcgcagaggggctgaatatgcttgcgatgccgtatgcgctggacgtgacggacgcgggcacgccgcagccggtgctgacattagacgaagcgatacagaaactggaggaaaagtttgactccatgatcgtggagggcgaatggcgcgtagacgaaattgagatggcgtacattgccgtgccgatagagggcacgaacgacgcgaggctgctgccggtgtggcgctttcagacggagcacacgatggaatacgccggaaaggacgacccgagccaaacgacgacgctgacggacaggggcgacattttgtttaacgcgcttgacggcacggaactttttaaaaataacggttcgatttaggaggtgtttttgtgaaacggtttgcggtggttttactttctgtgcttttggtgctgctgcccggctgcacgaagccggtgacggaaagcggtgtgcagagtacggaaagcggaacggcggagagcacagcggaagctttgagcagtactgagagcggggcggagaatactgccgaaaaggcagagcatattacgcagacgttatcctccggcgtgatggtggacacaggtgtgtatgtgccggaatcaatgcagcagcaaaatttgccggagatgcaaggtacggggcaggaaatagactttgagaaaataaaagagattttctgtgcgggtaagaaaattacggaagaaactgagggttcatacccgccggatatgcccggtgcgttgacggaagcagaaaagcatttgtctacggaagacggcgactatttattggtcggctgtggcaattcttttttttacacggcagcacgtgatacacaggatacatcaaatttagaactgtacaaaaccggcaaagacctcgactttgcgaccattgcggaagcggatgaggagatacggaaagtggcggaagagctcgggatttcggttggagacagcgtgtgctataccattgacacgagctcgatgccgcactatattttccaatacgatctgcttgtgaacggtatgccactcggcaaatttgacggcggcagttacagcgataacgtatttacaccgggtacatatttgacggcggtgttggacgaagacggcattcggcactttgacgtatcgtatgtattgaaagagacggagacgggcgacgcgcagcgtgttctgacacttgacgaggcgctcgataaagtagacgagaagtataactccatcattatggagggggattactatatcaacgatattcaaatggcatatatgccgatcaagacggatgatgcggggatcgtgcggttaatcccagtttggtattttcagactacgcatcaaatcttgctgccggataaatccggtacgggagagatcatgctgccgcaggacgggtatatcctgataaacgcgttagacggcacggagcttttacacgagaacggagatatatgaggtgtgtatgcgtatatttttgaatgttctgaaaaatgactttgcgcgtacagtgtgctcgaaagcgtttgtgtttgccgcgttggggttgactgccacgacgtttttgaccggcatggaggagctttcttatatgcagtcggaaaatgatttgatctacatttacgggatctttcagtaccttgattttcagcttttatatttgctgtttgcggcaatacccggggcggcgctgttctgcgcggactgggagaaccgattcattcgtttttcggcgcagcggtgctcgaagcgcatatacggcgtatcgaaaggcattgcgtgctttgtttcggcggtgctggtggtcgtcgtttccgagtggcttgacctcatgatcttacggctttggggctttccggcggtgaatttggaaagtactattcaagcattgggtgcgtttgacgtgattgggtattccgagcgggtgtacctctattttgcggcagtgattttcattaaggcgtgctgcgcaggagcgtttgcggaatttgcgctgtggctttcgacgaagatcacgaacgtattcgtgacactggcggcaccgatgctggcgtattacgttttgaatacgctgatgatgtggctgcgtatgccgagcaaattttaccccggtatgctctctaaggggctttcggtgttcggcggcgcagggacgacgacgcttgtgacgtgcgggatctttgcggcgttcggcgcggtgttccttgttctatttatgcgctcttgcagaaggaggcttgaaaatgggtaaggttttcgcttgcttttcgattgcgctgcacaactttaaaaaatgggcggtgaacccgcggctgtacattttgctgttgatggaggtcttgtatttgcactcgcggctttcgccggtgggcgagctgtgcgtgcggacgggatataaggtcacgccgtatctgctgccatttttgctggatgagggcagcgcggtgatgatgctgttcctcggtgtggtgctgctgttttgcgatgcgccgtttattgaggacgagcagccgtatattatgctgcggagcgggcggcggatatggttcatcgggcaaatgctgtatatcgtggtggcgtctgtgctgtatttaattgtgctgtatttcataagtgttcttgtgctgctgccgcatatcgaatggagcgcggaatggggcaagctgctttcaacgttttcgcagacatcggcagcggggcagaacggcatcagcattccgtttgcacgcgttatcacggcgcgatttgatccgatcccggcggtgttgcggtgtgtggtgaacgggagcttggtcgccattgtgctcggtatgctgatgttcttcgtgaacctgaatatttcccgcacggcgggcggcatctgcggtacggcgctcgtgctgtggaacatggtgacgtataagacggcgtactggtttgtgaatgtctcgccagtctcatgggtgaacctttcccgtgtagattatgatggcagctcgatatacccaagccttacgtatattttgttggcactgttggctttgtttgcggctttatcggcggcttcgtgggtgacgctgcgcaggcggaacattgacgtgctgaaatcggtgtgaaaggagtctttatggaaacttgtattgaagtgcagaacgtggtgaagcgttttcgcgaccaagtggttttgaagaacatatcgatctcgtttgaaaaggggcagatacacggcatcgtagggcgcaacggctccggcaaaacggtgctttttaagtgcatctgcggtctgatgcacccagaggagggcgtgatcctcgtgaacggcaagcgcgtgggacgtgacgtggacatgccggaggacattggagccattattgaagcgccgggctttctgccgaattacagcgggtacaagaatctgcgctttttggcgaacatacggcggaagattggcaaggaagagattttgagtgtgctgaagacggtggggcttgaccccgaaagccgcaagcatgtgggaaaatactcgctcggcatgcggcagcgcctcggcattgcgcaggcaatcatggaagacccggagatcctcattttggacgagccgatgaacggactggataacgccggtgtgcaggatatacgggcactgctgttggagctcaaggcacaagggaagacgattttgctcgcgagccacaaccacgaggacattgcggcactgtgcgacacggtgcacgagatggacggcggggttttattgtaatgatattcgatctgtggccgaatgatcaaaaaggaagcacgcggttttggtaggcgtgcttcctttttgatcattcacttttcggcggcgaggatcattttttcgagctctttggcggcgacgctcaggggttggcctttccgtttgatgacgacgacgcttctttccggtattttctcttccaaatcgatgcgacagacatttgaccatttttccaagaattcttccggcacgaacccgatgccgaggtcggcttcgaccatgggcaaaatttggtcggcggtgaacgcttcgatatccgggtggtatggcaggccatgcgcggcgaagaacccggaatagaactcgaacgatttggtatcggcgccgagcgagatgagcgggaattctaagagctcctcaagctttacttggcggtttgtgagcgttttgaaaaacggtgaacatacggcatactcgtggatgggccggacaggtgtttcagtgagcgaggcggacggtgcggtgggggtggtgacgacggcaatatccgctgtgccctcttttaacgcggcgatagcctgcggcgtggagtggttgctgatgcggatatggatgccggggtggagaaggcggaattctttgagcacgggcagcagcaggcagcgcagcgcgacctcgcttgcggcgacgtacacggtgccggtttgcagcgtgcggctctcggtaatctccgcttcgccggcttcgatatgctcgaacgcgatgcgcacgtgggcgtacaagcgctcgccctccggcgtcaatttcatgccgcggtttgtgcgcagaaacagtggacatccgagttcgccttccagatttttgatggcgcgcgtcatgttcggctggttatttaaaagctgctttgcggcctgcgagaggttaccgtattttgcaacataataaaaaattcgatagtaatcataactgatgtacatgttggccctgttccccttgctatatcataacgatattttagatatatagattatagattttacacatgaatataagagtattataatggtaatgctgtgggaagtcaagatgatttcgcgcagattttgtgctgaaaagcgtagataaaaagcggcgtttcaaggttttgtgcgccaaacgaagaaggtataaaatggaagcggtagtttttgaaatcattatgggtattttctttgacgcaggtatgctggcgatggtggtgcatgcagcgcagcacatcggcgaggataccggtcgcgttcgctttacggcggctgtatttgcgattggctttttccttgggatgattgcaaaatgcgttgtgggcggcagctacattgcgcttgccctgtatgcgctcggctttgtgctctcgtacacggcggtcgttttcactgtgccggaaaaggagcatgcctatgaaggtcgctgagccgtttcatctgcacggacagatgtccgacagcttccgcgcggcagtgttcatcattctctccggcggatttcaggacgcatatacctacttttgtcgcggcgaggtttttgccaacgcgcagacgggcaacattgtttttttgagcacggcgctgttccagaaggactggccgaacgtggtgaagtaccttatcccggtggtatcgtttttaatcggtacagcggccgcggagctgatacacattcattttaagacgtatgagaaaatccactggcggcagatcattttgttctgcgagatcgtgtttttgcttgtcgtcggctttttgccggcatactttgaaccgcttgcgaacgcgatggtctcgtttgtatgtgccatgcaggtgcagacgttccacaaggtgcgcggccacgcgtatgcaagcacgatgtgcatcggcaacatgcgctccggcaccgaggcactgtgcgcgtatttcagaacgcgggataaagagattttgcagaaatcgctgacgtatttcggtgttatttttgtgttcggcatcggcgccggccttggcagcctgatgagtggcttgcttgggacaaaggccatttggtgttgctgtgtgtctttgctcgttagttttgtaatgatgtttgtccccgaaaaaaacggataacccatcttctgcgttttccccttgcagagaagttataaccccaccgtgccatacgggccctgaaagctcccgtgtggtgcggtgggatttttataagtaaaaatcctctcgggtcgtgtatgatttggtaggatgaagtgaaccgaggaaacggttcggggatttgtcaagcgggggattgggattgagcatagaaaaagagctgtctctaaagagacagctcttttttggtggaaacgcgcgggctcgaaccgcggacctcctgcgtgtgaagcaggcgtgctatatagtgtagacaaggagtgaccgaaaggctgctctttttcatatcttaatttcatatttctgacggaaaccggcaatgttgccggttttttatatttccccggtttcgggagttttaggaggctcgttatgaaacaaatcaagaaaatcgcaattacaaacgaaaagggcggcgtcggcaaaacgatgacggccgtcaacctctccgcatgcctggcacagcgcggctaccgtgtactgctgatcgatgcagacccgcaaggctatgctacgctcaattatgatgtggacgtatctccgtccttacttgaggtgctgcgtgggcaggtagcttgtacgaaagccgtacaaacaacgcgctttggcgtggatgtgctgccgtctgaccgaacgctgagtgtgattgaagaagatttgatccgtcagaaaatgaatggtgcgccttatctgaacacgttggaaaaggcactggaagatcttccagattatgatttcgtcatcatcgactgccctccgcagggtggcaggctgatggatattgtacactattatgcggatgcgatcatcatgccgatgtttgccgaagactacggtatccatgctctgacgctcaaagctgaggctatcgcagatattcgccgcacgataaatccaaatttgaaaattcttggcgggcttatcacgatggatgagcggcgcggtttgcgcagtgtattccgcgaagtccttttgggacaggatttgctgccgatgttcagcacgacgatccgtcgcaatgtggcgctgatccgtgcggtaaatgcacgtgagccgatctgcgtttttgataagcggagcaacggaaatatagattatcaggctctggcagacgagtttttgagaaaggttggtgcgtaagcatgaaaaagctgaatttaggtaatatcaacgccgggttaaatagtttgaaagcagcaacagataacgccgcacagaacggcagatttgagctgatcgatacggcactgatcgattttgcggcgaagaactcttacgcagccgatgacaatgaggaatcctacaaagagcttgcggcgaatatcgatgaagtcggtttgctcacaccgttgggcgtgatcgtaaacggaaaccgttacacactgttctccggtgaacgtcgttttagggcaatcactacgtatctgcattggacgaaagtgccgtgctatgtgtttgagacaaaatctgtacgaaaggcgcaactgatgctgcatcaagccaatgcaagccgcgaatacacaccgcagcgcaaattgcagctttacgaagaatatcgagagctgcttgaagaaatgaaagaagccggtgagataaaaggcggtatgcaggagcatcttgcaaagctgatgggcgtttctgaacgctctgtgcgctattataagcaaatgtctgaacagcttacaacggaagaaaaagacgacgtggcagagggacgcttagacattaaagaagcccgtgaacgtgctgtggagcgcggacgggaaaccggcaatattgccggttctggcgagaaagaagaaaagagtgaaaagtcggaaaagccgaagcaggacaagcttgaacaggcaattttaaaagttctcaagcttgcggataaggaagaccctgaaaaagtcacggctttactgaatcggtatttgagagggtacatgggatgaaattcagaaagatcaatgtacacccgctgcgcggtgctgacccaaggctccgcgcagtcgcaaatatcttgacggcagacggatatgcgataaacggcatccgcgtctatgaggataaaggcaaaatgtatgtgcgctttccgattgtccattcagaagcacgtgcgtggaaagccgggcgtgcagcaaattttgcatttacgccctgtacacatgctgctcgcagagaaattgaaggagcaatattagaagcgtacaaaatgaaaaccggcaatgttgccggttttgaacaaaggagcgtgcagtaatgatgttaattagaacatcaacagaatcatggaacgcagaatataccgtgcaaggtaacagagacgcacaaattgtgcgtattaaatctcgttcaagtattacagttgttattgcaaaaatcatggaaaacctacccttagtcggcaaaacggttacgtattacatatccgtgccgaactacggcatagccctcccggaaatcgagagcttgaatgagtcagcatggatcgttgataaacttctcgtgcgaaatatgccgcgtgcggatgcagttacgattgctcaggtgctgagagatgttttgaaaaacgaggtgaaacaaaatggcaacgaaatacagagtttataatgagttatcagaggatgagaaggcccaaatcgccactgagaaacagtggcataagcgaggatattgtcccgtagagaacgagggcgaactcatgtactgcaatcgctcttggtctaaggcggtatattttcgagctgaccaagtgcggagaatgtccgaaacggaactcgcattgatccgcgccgagagaagtgccaaagacgcggcaaagcgtgcaaaggaaagggcggttgcattggctgaacaagaagcacagcgtaaacgggaaaatctaaatatctatcggcaaaaatgcgctgctatttgtgcggctgtgtctaagcgtccgacaaacctcaaactcgtttttgatttggaaacgaccggcttgaattttgctgaggatgaaatccttgaagctgcgattacgacagtagacggtgaggtgctttttgaatctcgatttaagcctgcatataccaaagagtggtcgggtgcgcagcgcgtgaatggtatttcaccagaggacgttgaggatgcgccgggaatcatcgataaaatcggcgaaatggcggcgctgctgcaaaacgccgaaacggttattgcctacaacggcaagcagtttgatattccatttctcgagcgttacggtattcgactccgaccagatgccgtgattgatgatccgatgctttacggtgcggtcgtatacggagaactgcgtggtgaaggtgaggacgtgaactataaatggaaaaagcttgcggtattggcggactatctcgggtacaaaggtgcgaattggcacagcgcggctgccgactgcattgccacggcttatgtgtggcgacagttgcaggagtcggacatgatcgaaaagtacaatgagaatttggcaaagcttaatgaggtgtcggaagaaaccgacacctcattttagacctattgcaattttgcagagcacaaaatataatgagatacacaagagaatcagaaacatgaaaaggagcggtgcagaatgaaggcaatgtacggagttgtgttgttgtgcacagaaggtatggcgatttgcgaggacgactgggaagatctctggtgcgccgagatgccggaagagtttgtgacagaaggagacggtattgaaatcgacggattgacaccattagaagatcttccgatagagcagcagacacggattaaaaatgagctggacgcactaccagaagaatatctggatgttctgcgtaattacggaggaaaagaaaaatttaacttgtcttgaaatacaggaaccggcaatattgccggttttcttgcttttcaacttaataggaattataatgaaaccaatgaggagtgaacgactatgaagaaagagatcacagcaatattgatggcggcggcgcttacggtatcgcttgcggcgtgtgcgggcagcaataccgaaagcgccgtaacggaaagctccgcatccagtgcggtaagcagcacggtatcggaaaagaacgatgagagcagcgcatcggcggaaagcagcaaaccgtcagcaagctcaagcaccgcgagtgcaaagcctacggcgacgccggatgcaaaaacggaaagcagtagtaagaccgagagctcgaaagaaagcagctcatccgtctcatctaaaacagagagcagcacgacgagcaatccgtcatcctcgagctcttccagcagtacggcatcaaagccgagtgcaactgcgaagccttctgcaacgacgaagcccagctccggaaacaccacgagtaaaccatcttccggcagcaacgcgactgcaaagccttctgctacagcaaccgtaaaaccgacaactgcaccgacggcaaaacccacagcgacgccgactgccaagcctacctctaagccgtctgcaaccgcgacgccaaagcctacggcaacggctaaaccgacggctgcacctaccgcgaaacccacaacagctccgacggccaagcctacggcagttcctacatccaagccgactgctgcgccgacggcaactccgaagcccaaagaaaaagtttgggttgtagatgttccggcaaaagaagaggttggtcattgggaagaagatgggtattggtggagtgatgtagtgtatagatgtaatgagtgtaaagagacttttccgacaacagatgccttctatgaacatgtaatccctcttgtcgaagcaggaaagcattcaatgggaagttatacagaagttccgggagaatcttattgggtaaaaacaggtcagcattgggttgttgatgagcctgcgcaagaagaacaaggtcactgggaatacaaataaaaaattgaatattgcagcatgaagcatccgttttatcgggtgcttttttactgcaaaaattcaagccgtactttttgagtgcggcttttttcatataaaaatctaacgaaaggaatggcaaaaaatgaagaaagcaaaacggattttggccggagcgcttgcggcgttgatccttacgatgtcactgccgttaagtgctctggcggatgaagccgatgtgcctgcggaaagcccgagctttgaagtttcgtttgatgtagataccgggcaggaagaaatttcggaagatcttccgaccgaggttgaagcgacaccggagcctaccccggaatctaccacagagccaacgcaggagccaacacctacgccggaaagcaccgctacaccgaccccgacggcagaacctaccgcagcgcccacggctgcacccgaagttaccgcaacgccgacaagcacaccggagccgagtgtcgccgcatctcctacgcccagtgctgcgccgagtgcgtcacctgctgcaaagccgacgcctacgccgtcaccgcagccggttacaaacccaataaagcttgagcacgaggtcttaacggactatgagaccggcggactttatctgttcccagttcccgacggcgacgaaattacgcaggaatacagtgagcaacacaaagcttgggatatagctgctgttactggttctgctgtggtggcagccgaagaaggcactgtaacttatgtgcagatttgggacggatcgtatgacaccaccggcatgatgagctacgggcacatgattcggattgaacatccagatggaaataccacactgtatgcacatctatctgaaattaacgtgcagcaaggcgaaaaagtcgtgcgtgggcagcgcatcgggcgcgtcggcagcactggcaattctactggcccacatttgcactttgaggtcatgagtgagactggtaaaaaggaaaaccctgaaccggtattagaatacggagtatccacgctactggatgattacacatggagttgggtcaatcagtatcttaatcgacctaatgggacgaaaacaatatctgattacggagtaacaagagacaaagttgtagctgaacttacttcgcatcaaagtgataactactatttgggtactacatatgtaggcggggatagccagtctcctaaaggagatacaagctacaatggcagcgtgggtatgaactgtgctggctttgtcagctatgtgctttgtaaattggggttaaatgcgggtacgtctgacttgaataatcatactgcgttgcctgcgaactcggttcaggggcttatgactaaggcggtcggtggtcgttctgcagattggtacagctcgtataaaagccgaaaccttttggcaggtgcatcaaactattgcttctggattgcaaacggtgatcttaagtcatatgcattccagtcaaagagcgatatgctttcgtctggtgtgcttgaaaaaggtgacattattttaatgttgccgacaacagcatcggccagtgaccgagatacgcatattggctttttctggggaaactcctccagcgaagataatatgtggcatagttttggttccaataaccatatttcgaccataacacctaagaccagcccttcttattacgtggttattaagtacgcaccgtctgaatatacactgacgctcaataagacaagctctaatccctcgttgacaaacaataacagcaattacagcttgtctggtgcagtgtacgaagtttacggtaacaaaaccacttatacaacctcaacagtcacgtattacaccgtaaatgcaagtggtggccttaatttgcgtagctctgccaatacaagcagttctgtgttgataaccatgaccaatggagcaagcgtaaagtatcttagcacatcaggatcgtggtatagggttgaatatacccattcaaacggtacgacctatacaggatatgcttcatcgacatatcttacgaataaaactacgcaaactatttatactccaacagtaacatcgaatgcattacttggtacgcttacaactaactcgtcaggatcggcgagtcttgttgtgcctgcgggaacagtgagcgtaaaggagaagaccgcaccgaaaggattctccgttgataatgaaactcatacagtaacgatggacggtaataagacactcaatgtctccgatacaccgattatctatgagtacaatattaacctcacgaagacgagtgccaatgtctctatcacaaacggcgacagtggatacagcctcgccggagccgtgtataaaatctataacagttcaggtacggaagttgcatccatcaccaccgattcatcgggcaagggcagctcgagcgcgaagctcaaaaacggcacatataccgccgtggaatccaaagcgcctccggggtatgccttggacacgacaaggcataccgttaggatcaacaatgctgacgcaactctgaatgtcagcgatgtgcctttgattaagacggtgacactaaccaaaacgagcgctaacacgtcgatcacggcaggcaacagcaattatagtctcgccggagctgtgtacgatgtgtatgaaggtaattctgctacgggtacgccggttgcatcattcacaactaacacatcgggcgttgcgacgttaagtcgcaaattatatccaaatcgaacatatacaattttggaacgaactccgcctcccggatatgtaaaagatacgacgccacatctattctatcttacttacaactcggcaacaatggatgttgtggatgacccacaatatgtcaagatcatggtaaaaaagaaagattctggaactaaaacaaatgtagctgctggtaacgcatcacttgcgggtgctgtgtacgcaattacgtataaagaaaacggtgtagataaaaccgttcaaaaaacgaccaatagttcaggaattctctattttaccaacgtgcctttgggcgagataaaaattcaggaaatctcagctccggtcggctacaagcttgattcaacggtgcatacgtacaatgttacgtcggacaaagtaacttctgccgtttacgaaatggaacccgaagattttaccgaagacgtattcaaaggcaaaatttcgctcacaaagcagattgaaatgcttggcgcggatgcacagcttgagcaaggcactgaatatcaggtgtatctcaaatctgccggtagctatgccaacgcaaaagacacagaacgagattatcttgtgaccggggcggacggcaaggcgaccaccaaagacctgccctacggcacgtatacgctgcatcaggttaagggtgtgccggggcgcgaatttaaagacttggatgttgacgtccacgaaaacggtaaaacgtatgaggtgacgctcacaaacgagctcaagtatgcgccgctcaaaatcgtgaagacctccgaagacggcaatgttgccggttttacattcaaggtcacacggcttgcggatgggtatagtaaaacatataccaccaatgcggccggtgagatcattacagatcagatgcctgtatacgtcgatgcagatgcaacgcagctgtatgagtacaaggtcgaagaaatcaacgtgccggataaatatcgcacgccggatgcacagacgataacacttacctatggacagacggcagaggttcgcttttacaaccaaattgcacgcggcacgcttgaaatccttaaagtagaccacgacggtgtgacgccgcttgaaggcgcgaagtttgagattacagacgataacggtaatgtaattgcaaccaaaacttccgggccggacggaaaaatcaaggtagactcgatcctttacggacaataccactggtcagaggtggaagcgccgaagggttatgaacttgatgataccgtgcatgactttgcaatcgagcacgatgagcagatcgtagaagttacgcaggaaaataccccgagcgtgggctctattacagctaaaaaggttgatgccgatggcaatgctatgccgggcgtagagtttacgcttgagtacagcaccgacgacggcgcgacatggaccccggtagaagccagagcagaagacagcaagccttctatcggcggttgcacaagtgcagtcgttgacggcgcacttgtgaccgatgaaaacggcgtcactacctttaatgggcttcaggtcgataaccagaccgtgacgattctttatcgcttaaccgaaaccggcacgaagtccggcaacacattgctcgcagcgcctttgtttatcggcagcttgccgcaggtgctcgatgacggtacagaaaccgttgatgtggttgttacagcggtcaacaatcaaagttttacattgccgtcttcaggcggtaacggcatgatgggcgtgccggtaggcattgctcttgtactgatttccgcgtcctgcattttaatgctgacgcgtaaaaagaggttttaaggggattctacaacccttggaataataaacgaagaaaggaaatgagtagaaatggcaaaatccaagttaatctctcgcattggtgctttggctttagcagcagctctggcctgcacctctctgatctcggcctcggcggctactatcgataaagctaccatcgatatggacgcaaaggcacagctgtccatttataagtatgactttaccaacgccaaaaaagatggcgtgtggaacgaacgcagctacgtttctaccggccagtatgacgcaaaagtaaatgaagtgcttggtggcacaacgcgtaccggtgcgaacagcgcatcttctgcacttggtaatggacaggcaagcaacggctatgcaattaaaggtgtcgagtatacttacctcaaaattgcggacatcacgcagttcacggagtccgaaaaagacggcggtcgtaccgacagccacattgaggtgctgtatgcaatcgataaagtcaaaggcgcagatatgctcgctgctatcggccttgcagacggcaaaaacagctatgaaaacgcaaatgcacttgatgcaaacaactggtattaccagtccgacgtacttagtgcagcacttaaagctgctcttgaagccaattccacgactgttaagaattcgctcgaagcctacgtaaaaaacaacggcggtacggcaatgaccgaaacgaacgaggacggctacagcaacgtaaccggcctccccgtaggtctctatctgctggttgaaacccgcacaccggaaatggtgacaggtacaacaaatccgtgctttgtcagtctcccgatgaccactgttgacggtggtatggcagacggttccggcaaccagattacgaccggcggtcatgactggaactacaatgttgttctttacccaaaaaatgagaccggcattgtcacactggaaaaaaccgtgcgtgaagctgtaaaagacaccggtaaaaacaacgcgaccgatgttatcaccgacggctttacacacaacgcaacggcatccgcaggcgacaccatagaatatcagatcatctccacactgccgacgatcacgtctgcggccaccaatatcagcgcgtatacgttccaagatgttctggcccgcggcctctcttatgtaggcggcacgaacagcgttacactcgaattctttaccgatgcaaattgcaccaacaaagttaccacgtggaagcagtccgacggcaaattcaaagttacgcgcgaagaaaacaacgacggtacgcatacgatgacgatctccatgaccgatgatggccttgccgagatcaacacagccaatacggcttacgataacgataacggcaagctctatgcaggttacagcaattacacacttcgtatccgttacgacgcaaaactcaattctgatgagtctctggtttacggtgacaacggaaacaaaaacgaagtcgtcctcacatggaagcgtaccaatggcacctactacgacacccttatcgacgacgcgcatatttacacgtatgcgacgaacatcacgaaaacctttagcgacggtaaagaagaacagacgatgttcgataacgtcctctttaaagcgcagaatgcgtccgatggctactatgtaattgcacagcttaatgaggacgagggcatctggtatgttaccggacacacggacaaagaagcctctgcaacagcaatgcaccccgtcgaatggaatggcaaaaagggccagatcatccttaaaggcgttgaggacgaccagtacatctggacagagctcgagactgcaaacggctacacgctgctcaaaaataacatcgacgtaacgatcaagtccgtggatgatgcaaaccgcccgtgcgacatttacggcaaagatacactcggtgttatccagaacgacccgcgctacaacttcccgaacaatgaagattataagctcgccaacatcccgcagaagcagttggctcataactatcagactgcatctgcaacggttgacggtaacgacgtcacgatgctcgacgatgagatggatactgattctaccaacgcaattgcgccattgacagttgtgaacacaagagttttcattactccgatgaccggtgatagaggtacgcaggcgcttgctatcggcggcgttctcgtcttctgcctcggcacttctgcatttattttcttcttggttttcaagagaagaaaagagcaggaagataagtaagagtacaccaaaattttgaattaggtttacctcgcagggagggctcagtgacagcactgagccccacccaaagcctgcaacattgtgtgtaggctttgggtgaaaaggaaaaattgaagaaggtgaaaacatgccccaaaagcgaacgtacaaaggtgcgcaggtcatagccatcatcatcgcgattttactgctgtgcgtcgcgggattttgcgcgtatctgctcatccataaccaacagcaaaaagctgagcaaaaggagatgtttgcaaccatagccgaaaaagtagacgcagcggaaaacgaattgggagacttagagcaaattagcacggtggaagataaacgggtggcgcagctgcttgaagtttatggggaactgcacaactacaattccgattttgtaggctggatacgcgtgccgggcacagagatcaattacccggtgatgcagtcgccggatagccctaattattatttgcgtcgaaattttgagaaagcgtacagcaacctcggcacgccgtatttacaggaaaactgcgatatacgcacgtgcgataacttgataatttacggccaccacatgcttgatggcgggatgttcagcgatcttgagctctataaaaagagaaaattctttcagcagcacaaatacgtgcgttttgacacattagacgagctggggctatatgaggtcatggcggtcgtcatcacaacggcctatcaagcagacagttttcaatactacaactacatcgagaacaacgaattaacctttaatacatacgtacaggaatgtaagcagcgtgctctatatgatacgggcattgatgccgaatatggagataaattagttactctatcgacatgcgaatacagcaacgataacggcaggctgatcgtcgtcgcaaaaaagattggagggatcaaaaaatgagcaaacgcaaaaacaccatcatcattatctgttttatccttgtgatcctgcttggcgcaggtgcagctacgtacccgttaattgcatcgattaacaacgagcgcacgcaatcgctcgtacagacggaatacgaagaaaagcttcagcagctcgacacttcggaaattgatgaagcccttaaaaaggcacatgaatataacaaaacgatttctaccgtacagatcgaagacatcgataagataaaggaaaatcttcctgattacgaagatcttctgaaccttgccaataacggcatcatgggctacatagagataccgaccattaacatagacctgcctatatatcacggcacgaccggtgcagcaatggaaaaaggtgcgggtcacatggaaggcacgtcgctgccggtaggcggcgtcggcacacatgccgtgatctccgcacactccggcatggcgggagcaaagctttttaccgacctcgataagcttaagcttggagatgtatttttcgtgaccgtctgcaacgaaaagcttgcctatgaagtggacaacatcgcagtggtggagcccacagacatagacctcattcgtattgatacacagcaagattatgtcacattgctcacctgcacaccatatggcgtgaatacgcacagattgcttgtgcgcggccacagagtggaaatggccgaagaagccatagcggaggttgaagaaaaggtagtgccggagggcagcacgtggatagagaaatatgcggaagggcttgtgatcggcttcatagcttcctttgcggcgatgctgttgctgctgatagttcttctgatccgccgcagacaaaaaaagaaaaccggtaacattgccggttctgaaaggaaatgatagaatgccaaacgcttatatagagctgattgatagcctgattttacagcggcaagcacttaaaatatcgcagcgcgaattagcttctgccgccggagtttcgtggacggaggttgcgctcatggagcagaaaaagcacatggtgcagctccgggcactgctgcggatagcagccgcgctaaactgcaaactggtggccgtgagtgtcgaataaaaatcttgccatataatgccaaatttggtagaataaaaacgaactgcaatatgcggttcgggtgctgccataacggtggacggttcagccctcagatacacttcggtgtaccgtgtgagggaacatttcttgaatatgaaaatatccctcaatccaacacggagagagggatgacgcttatgaagctcgagctgacctttagtgatttgtgccagttggcattggtcatcattgcgctgatcgaactgtttcgtgatcgtaaacataaaaagaagtgagccgccctcgcctaaggattcggctcaacttctttgagtaatactgagggctaaccgttcatcggcagcactctttctatttctaattatagacgcttttgaagttttgtcaagcgcgaaaagcggcaatgttgccggttttgcacttgatttattttttctcatttattataatcaaactaaacagggagtgaagactatgaaaagaaaaatcacagctattttaatgacagcagcattgatgcttaccatggcggcgtgtgcgggcaacagtacagcggataccggcgttgaaagctctgcatccagtgcagtgagcagcaagccggtttcgaacacaagctccacggccgcaagcagcgccaagccgagtgcatcggcgaagcctacggctactccctctgccggtgctgcggcaacggtcaagcctaccgcaacgccgaaaccggagagtaaaaccgaaagcagcacggcaggtaaagcgagcgcgacggctacaccgaaatcggcagcaaccgcaaaaccgagcagctccaatacttccaacagcaagccttccggcagtgcggccagacctacagccgcaccgactgcgaagccgacagctgcacccaccgcagctcccacagccaagcctacggcagctcctaccgcagcgccaacagccgtgcccactgcgacgccgaagcccaaagaaaaggtctgggtggtggataccccggctcgcgaagaagtcggacactgggaagaagattattggatgggcagcgattgggtatatcagtgcaatgcttgcggcacacaattcagcactgttgatgaatttgagtcacattcagactatgagtgggagttgggaaacgatcacggaagttacacaatgacatccggcgagatgtataaacattatacaggagagaaatattgggttgtggacattcccgcgcaagacgaagtcggccattgggaatatagataaggatcaaataaagtgaatattgcagaatgaagcactcgattttacattgagtgcttttttactgctcaaattcaagccgtgtcattttatatgcggcttttttcatatagaaaaatctttgaaaggaagcaaaaaaatgaaaaagaaactcaaaaagtcacttgcatgtctgcttgcagcgctgctgattttcagcgccgtgccgatgagcgctcttgccgatgaggcagctgcaccggctacagtaactgatgagatcacagctgttgagccggaagaagctgctgcaccgggcgcggagccggatgcagaacctaaaccggaaaccacggcagaaccgaccgcgacgccggaggcgagcacagaaccctcggccgaaccgacagcagagcctacaccggaagtaacggaggaaccagctgaaccggagaccagtgcagagccggaagcaacggctgaacccactgcttcccccacgccaaacccggaggatgaaatcagtctattagcgctcggcgatgaggcaattacgcgttatcgcacggtaggtatcaaaggcagtttcagttcaaattatctttatgaccttggcgaatttccactgtatgacatctaccgaaatggtgtaagttacccggcctactgtttgcagcacggtaagggtcgtgtgaacaacggagcatacgtgcaaagagacaattatggcatgactgaagctatgcgccgcattatcgcttatggctacaacacgacaaactctctcggtaaaaatgattggtacagcgatgcgaccgcaaagacgatggtcacacagcatcttgtttggctggcgtccgaaggctatattaccgtagacggtacaaactggtcttggggttccggcatcgataacgatgttgagcgcatggccaatctggcgtataacggttctgttgtacgcagttactacgcagagcttaaagatcgtcttttgcggtcggaaatcgtcccgtcctttgcaggcaaaagcagcgacggcagcgatgcacaagaaatcgctttgcagctcgtgaatggcaaatataaggccaccgttaccgataccaacggcgtgctggatttatttgattttcaaaaagcaggctttgatatttcccgtaacggcaatacgctgacaatatctgcgagcacgctgccggagcaagagaccacggttatcggtgcaggctacaccgtcggcgataaaaacagcatcgccgtttgggaggacagagaccagcaggccaatattcagcaccaagcgacctgccctggcacaacgcagaccatggcatatatcaagataaagggcgaaaagcctaaatatacggtgacactgaccaaaaccagcgccgatgtaaaaatcacaaacggcaacgcaaattattcgctcgaaggtgctgtttacaacgtttataaagcgtatgtaaatcccaatcacgactacgcaaatgaccccgttattgcaacgttcacgacagacgcaaacggcaaggcaacactttctcgtaagcttgaaaatggtgactacgtaacgattgagcaggtggccccgttaggatacacattagataaaaacgtacacaggttcagtatcaatggtaagagtgccaatcttgatgttgtggatgaccctacaaaaattcgccttaccgtaagaaaaaaagatgcagatacaaattctaatgttccgcaaggcgacgcaacattagaaggggctcagtaccgtataacctatacgaataacgatgaaaaaattgaaaacatcgtaacaacgaacaaatcaggacaggcagtactcagaaacattcccatcggcgttttagtaaccgtcgaggaaatcggcgttccactgggttataagttagacagcaaagttcatacatacatcacaacaaccgataccaaagaactggaatatgatttaattccagaagattttaccgaagaagtcatgaaaggccagattgcgctgcataaacagtacgaaacccttgatgaacctgccgatgagcagggcgcggagtttgacgtatacctcaaatctgcgggcagcttcgatgcagccaaagagaccgagcgcgaccatatcaccaccggcgcggatggcatggcaaccacaaaggatttaccttacggcacatacgtcgtgcaccagagcaagggcggcaacggtcgtcagcttgtagccgattttgatgtttcaatctccgaggatggcaaggtttacagctatgatcttgtcaacgtacagaaaaatgcacagctcaaaatcgtaaagacttccgaggatggcgtaatcgaaggcattaagttccgcgtgacgcgccttgaggatagctattccgcagagtatgtaacgaatgccgcaggcgaaattcttaccgaaacacttccgatttacgcggacaaagacggcgcgactaagtatcagtacaaggtcgaagaacttgatacagaggaaactttcggctatcagcttcccgactcgcagaccgtagaactcagcgaaggcgaaattgcttctgtaagcttccataatgtgccgattgaaatcggtacgaaggccaccgttgagggagaaaaagaagttgatccgctcgataaagttacgctgaccgatacggtatcatacactggccttgttcccggtaaagagtacaaagtaaccggcgtactgatggataaaaaaaccggtgaaaaattacttgtgaatgggaaagagatcaccgctgaaactacctttatcgcagaaacaaagaatggcagcgtagacgttacctttatctttgacgcaaccggtctgcatggtaaaggaatcgttgttttcgaggatttgtaccgtgaaaacgcgctgcttgctacccatgcggacatcaacgacgaagggcagaccgtaaagattaagaatcctgaaatcggaacaaaggcaacagcagacggcaaaaaagaaattacagcggataagatcacgattaccgatgttgtgagctataaggatttgacccccggtaaagaatataagcttaccggtgtgctgatgaacaaagccacgaacgataagctgctcatcgatggtaaagaaatcacggcagaagctacctttacgccaaaagctaccaccggcgaagttgagatgacgtttactttcgacgcgcgtgagctgacggtcgaaactgaggtcgtagcttttgaaacgctttatcgcgacggtattgaaattgcagtacatgcagacatcgaagatgagggtcagacggtgaagattctgccgctgcatggctccatcagcacgatcaaggtcgatgcaggagactcgcagcaccgtctttccggcgctgtgttcggcatctatcgcgatgtaaacggcgatggtcgttacacagagggcatagatacgtttgtcggcaatatgcgcgaaaaagaaaccggtgtgtatgaacttgatggtttgctttacggcaagtttctaatccatgagaagcaggctccgtctggcttctcacaggataaaaactattacagcttcgaaatcacaagagacggggaaaaggtgcagtttgaggttaagcccggtatgaatttcccgaacagcgcattcccaaagaccggcagcagtaatcacggtgtttatgcagcactgctcgctcttgtggtttccggcctcggtttaggtgctgtgatttttcacaaagtcaaaaaagcaagtaaataagtaaaaccggcaatgttgccgattcctaagctacccgtgcagagtgagaaggcccattaccgtttggtgatgggcttttgtaatgcagagcgccggtcacaatcccggtggggcactgcaaatttaatgtagtagaaaggtaaatgttgatatgcatatttttgaagaagcaagcccaacgattatagggcagatggttacgcctaaaaacataggagacttttttcttgaatcatcgtactacttttactgctgggatgatcttatggagttggaatacggtcagtgtgttagaaacaagaaaaaatattattttatctctgagtttgctgaggcaattatgaaaagaggctttttctgcgacaagcctctttatgcggaattcacagaagagcaaattcagaagtatttcagcggcgagtattcagtcggacaaatctttgctcttgcaatatctcaagcccttaatttcacaccagaacaagttgaagttttggaagataaaaacctgaaatgcttggccgtatggattctgtacgatatggtattgggtacagatgtgagagatattagagaaatacttaataaaccgatttttatagaagaaaaggaaaagcaaattcggaacttgcatggtaaaaggcattacttactcatttcccaagaaaactggaaaatggtaacagagtggaacgcatggaacaagtgcgccgatgacggtacactcaattgtattaaaaatttgcgtggtaatttcctttgttcggatgcagttatggatgatgactataatctcattgatacaaatgaaaatagatacttgagcatttgattatagactatattagaagaatttgtaaatttgatgaatgacatagttttgtgaccacataggggcgaccacttttggatttctgaaattctgaaaatacggcaacatagcctatttgttgttttaggtatttatactcgacagggagatataagaaaacttttttagaaataaagacgcgacatgctaatgacgaagaagtatgttcatttgttgcaatacgtctgagaagtagtgtgtgcctatcgtctttgttttccatttctatcgagaattttccatatcctaatagaggagtattataatcttcatctcggaaacccattaaaagattcttgggctgtaagtgttttccttcttgtgtaatttgaggtggagttttttcaatatgaaaattagtagcgtggttagtatttgttttacatatagaagttttttgtggtttgacatgagaaattcgcgtaagaaggctgtgtaactgacgtgatacatagtctctatcttcagagttaaaagagttcataattgtttttgctctatttgtggacagataaagttgggctaaggggcaatcttcagcatgtgattgtttctgtgcagttcgcaaatatgcaggttgatcgtttacatatgtaagtttagcctctttgcagatagggcagaccatgtacggttcatactcagcgcgaaataaaggaatattgcgatatattagcgctatttgaaaaacagaaagttccgattttttgttttctaagtaagcataatcaaatttcatcttcagtatcgcctctaatagtcatataactgttggtaaataacataaatattgtatctaatttgactgtacaatgcaatataaagtttgacggtaaggaaaaagcagtacgtggatgttcgttgacgggaagacgctgtacataagtaaagcgtgaccggcaatattgccggttttatacgaaaaaggagcgtccacaactttagggacgctcctcgcagatggataatgttgaatttgaactttcagaacagatcactatgtgatccggttctggttaagcagaggatgagctcatcgttttgaatttcataaattagaagccaatcgggggtgatatggcactccctgcaaccggcataattgccagacaagttgtgatctcgataattttccggcaaaggcttttgttcagccagaatggtgataacctcttccagaagccgaatatcgtaaccccttttgacgattcgcttgtaatcttttttgaaggtcgtctgatacttaatcgtcagcattcagatcctccatcagctcttttacggaggaaaaacctttgctcattccaattccgttttttgcgtcttcgatagcttttcttgttacggcgttcggtacttcggcgccgatttcaaaaggaatgcgatattcgcgtactgctttttttgcgaaaacggtaaaagcggtcgtcatcgtcatgcccatatcagtgcagaaagcctcgaattgtgtttttaaatcgctgtccatgcgaatattgacgtttgtttgtgccattatacaacctcctttggtacttatattatagcactttgtaatgataatgtcaataaattttcgtgcaaatgatatatgaagtatagatgacaatcgtaacataataataagaaagaaaagaggagcgagaatatgcaaaaagttgttggatttttcagtaaaccggaaaatctgtttgtgctgacacttttgatagggctttttacggggacgtataaggtggtgtcaaaggcctcaaatcacaacaatagcttgtatcaaagggtcagctcacctatatgtttctatcttaggctttttgggtatgtatatacccttccttggataggcagtttgttgatttcgggaggaaattatgaagaatggttgcaggcatcaaagaacacagagccatatagatttttcataattggtttggtgatgatcttcgggagttatgcgatgtatatttcggtgctgcttgagcgcattgcacgcgggattatggataaggtttcaattaaaaatgatcttgaactcatcaattcaaaatttggcacaagctatacggcaagcgactatatgtatggtaaagggcacattaagcaaattgtaacttatataagcataggagaagaaagtattgcggagctgatttcaaacccaaaactttcagatgcaaagagaactgtaattcttgaccttcttagtcgtggacttacagtagatcagattaagccctacatacagtcggacgatccgtatacagcggaacagctgcaatttgaactctacaaattgttttttacccaaatagggatcgtcaatagccgcaatataacaaaataacctgcccgtgcagagtgagaaagctcattaccgtttggtgatgggcttttgtaatgcagagcgccggtcacaatcccggcggggcctgtaaataaaaggaaaggagcaagaagctgcgccggagttccggcaaacaaaactgtaaacttatattttcggcaaaggagaaaggcaaaatgaaagaaatgtatggtgttgtgctgctgtacacagaaggcatggcaatttgtgaagatgactgggagaacctttggtgcgctgagatgccagaagaatttgtaacagcaggagatggcattgaaatcgacggattgacgccattagaagatcttccgatggagcagcaagtgcgtgttaaaaatgagctggctgcactgccggaagaatatctggacgtgctgcgtaattatggtggaggtgaggagtaatgcccggttacggaaaatatcgttcaccagaggaaaaagaagaatttgtaaagcaactgggtgcagacgccaagcagcgcgttattgaccttgcggaaaactgggaagcagatgcaaaagatgttgcggaatttttgattttttcaagccggttcccagattacagcgtccgcaaccagatgctgatctacaagcaaaatccgtatgctatgtttactgcgggatataatcaatttgaaaaaatgggctataccgtacaaaagggcgaaaaaggtatgcgtatatgggtaccccataatattacctattatcgtggcaaagaaagtgaaccatggaagaggctgacgaaaagcacaccaaaagcagtacgggacatgataaaagccggaatgcttgagacacgtgaagaattgcagttctatcgttatggagtggtctttgatattgcacaaacgaattgtcctgcggaagattaccctaaattagtcggtctcggctgcgcagatgagctgcacgcagcggcgtttgacattatcagcgaatacagcaaccgctgcggaatgccggtgcggacgattgatttaaagagcgttgcactgcgcggatattacgaatcagagacatgcaacattacgattaacagccgccttgctgatacacagcgattatcgacgctgctacatgagatggcgcacggcatgttgcaacacggtatggataccggcaaaagccgtgcacagcgtgagtttgaagcagacgctttatccgttatgcttgaatccgccatgggtctgccaatcactgacacacgtaaggagcacatgagcgtggagtataagaactacataaccgagcttaaaacgggcaaaacggatgaagaaaaagcaaaaatcaatgagcagatcgataaggtttttaaaccaatcggtgatctatataagcgccatgcgccgcagattttggcagcactgcgcttatcaggcattcagccgcagccgataaaaacagcgcaggcagcacctgaacaggaagaaaagacgccggagcacattatggacaagccgaaaagaaaaatgaatcgttcactgtaaagagaaatgaacgtagaaaggagtgaattttttggcaatatcgagagatcaggttgatgagatcaaaagccgcgtgagcattatagatgttgcagcagaacgtgtgaatctatcgcggcacggttcaaccatgtcgtgctgttgtccgttccatcaggaaaaaacaccgtcatgcgtattgtatgagaagaccaattccttttactgcttcggctgcggcacgagcggcgacgtcatatcttttattcgcggtacggataatctcagttacgtggaggcggtgcagcagctcgcccagcgtgccggaataacgattgatgccaaaggcgcacagctcaatcagcgtgagcaggagctcagagatcgtattcgtgcgtgcaaccgagaggcggcacgttacttcttccgttcgcttacacaggacgatgaaggcagtgtcgggcgaacttatttgctgaatgaacgcggtttgagcatggccgctgtacgacattttggtttaggttatgcgaagccggaaagctttgggcttgtgaattatctgcgcgataaaggctttacggatgatgagatgataaccgcaaatcttgcgtaccaaagtaaaaccgggcacgttatggatcggttccgagaccgaatcatgtacccgatttttgatacagtcggcaatgtaattgcgtttggtggacgcgccctgaacaaagaggacaaggcaaaatacataaacaccaacaccacgccggtattcagaaagtccaataatctgtacggatataacttcgcacgcaaggcgcacagcgaccatttgatactcgcagaagggtacatggacgtgatcgcgctgcaaacagcgggctttgctggtgcggtcgcttcactcggtacatcgttgacggaggaacaagcaaagctgattgggcggagctgcaaggagcttactatttgttatgacagcgacagtgcgggcatcagagcaacgcaaagagctatacaggttttgcgttctgcgtgcccagagttgcgcgtcagcgtggcttccttgggcgaaggtaaagacccggatgagttcataaaaatgcactcggaggacggagcagaacgtcttgctgaggctttcaaagcagcgataagcgataccgaataccggctacaaatgtgcaaaaacgggttggacatgaacgtgaataaagaccgtttgacttatgccgttgaagcggtgcgtgtgttggcgacggtcgaaaacccggtggaacaggatttatttgcggcacaaattgctgcggaggtcggagttggacgtgagagtatcttagcacaggtgcaggcagctgcgacagacccggcaaataaaaccgtgccggaagaaattaaagacgaggaaatttttgagccggaagaagaacctacacagcgctatcatgcgtttattcgcccggtttctgacgcagaaagtgaagtggtagcctttgcggatgtcattataaacgaagactaccgcatcaacggcgtgcgtctggtgttggatgaacacaatcgattttcggccttgatgcccgcgtatcttgctaaagataggcgtgaatgggttccgtacgtcgagctgaagccggagattgaaagggaaatgacggcgttccttgcacgtaattttgatttcaactcggaggttgaagttatcggcggcggtacggcgatagacgtcggagagacaaagctcacgctgcggaaggctgcaaaccgcaatacggttaaagcgtatgccgagctgcaaaacgatgtgtttgcgctcaaatacggcaagatcatggagggcaaacgcgggtatttctattcaccgccgagcatgggaacgtacacagatcaggacggcaataagcaatatcagtatgcgtatgggtttgcttccgcaccggagcgcacaagaatttcgggagaaattaagaaacaatacgagctcatgtgcaaaaaaaacaagcgggtctatgaagcaaaaatcaaatagtgaggtgagattttgcagacgatttatttagttaccggacttcctggcgtcgggaagacgagctttttgcaggtgcttgaaggcttaaagctattgccggagtacagcgtcacgccgcagagaatcgcacgaatctacaacagttcggaaacgtatgcgatgcaaaagcttattgacgacgggcgcagttttctttgtgagctaccgctcgagcaagaaaaaatggaacagtttttcggtttacttgagggcaaaacgtatgcgataaactgctattgtatgggtctgccggacgcagcagaagccatagcgcgattggtgcggcgagatcgtacaggtgttccgactgcgaaaattttggaagattttgaactgttcccgtccaatatccgggagctttcaaggcgtgtagaaagcatcaagttcttcgataacacacatgggttttgcttgaccggctattacagtgcgggaaaatttatgctttcagatgccggtcattgcgtgccgtggatgcaaaccgttagagctgcactgcttccgaatgagcagcaaattacgccggagagtgtgtggcagacagaaatttttgaaagaaaggtaaaagaaaatgaagaaaaatcagatggaaatcgtggtgaagctcaacgtaagcgcggaaaaaagaagggcgctcgagatgtactgcacggacttcgcgggcacaatgcaaaaggatttgcaggcagcggcggaacagattttaacgcaaaaatataacaagtccgtgccgaaagccgtgcgcgaatacgtggagttgtgcagagacgaggaaaattcttccgctgcaacgagcgaaaagtaatccactttttcgcaaaacgcagtgaaaaactgcgggaaaccttctccttaatcagcaaatttctgtgtctgccggacatgtttttgcgtgcggcggcgcaaaattttgggcgaactccgttcgtttttttgctatcagcaaaaaagatttgcggcggaagccgcccgggcaaacagaaaaagcgcgaaacgcactttttctgtttgctttcgcaagcataccattcttacgtaagaatggtagatcggtgaaaatcaccgattttttagggacaccctaaaacccgtcatgcagaaagaagtgagacaaataagaaaaggcgaatacaaatacccttaccgtttagagttgcgcttaaatgaaacacaaatggcacgtctgcaatccttggcgagcaaatccggcttatcgatgtcggcgtatgtgcggcagcttatcgacggtgtgcttccgcaggaacgcccgccgttggatttttataagatgctgacagagctgcgttatattggcaacaacatgaaccagcttacacgcatagcacatgcgaccggcagaatcgacagagagaaatttgagcggctgaccgatgagatcaagccgctggcatctatgctgtatcgctacgttacggagccaatcaaacgcgacccgatgacttcggagcttgggacgtatatccgtaagtccgaccaaaaggcactgaaagaaaaacgggaggaagaacgaaagtggcggtaacaaaaatctggaagatcaacggctggatcggcgactgcctgctttacatcgaaaatccgaacaagacgcagaacccgttggtgatcggtgatccgaaattaaaagaggaagaataccaatctctgacggatgtgatcgagtatgcggaagacggcaacaaaaccgtgcgggatactgagcgttttgtgtccggcgttaactgcgatgcagaaacggcgcggcaggaaatgattttagcaaaaaatgcgttcgacaaaaacgacggcatttgtgcctaccacgccatacagagctttgcgccgggagaggtcacgccggaaacggcgcacgagatcggtattcggctcgcaaaagaaatgtggggcgaacggtatcaggtgcttgttgcaacgcatttagatcatgagcatatccacaaccacttcgttatcaactcggtttcgtttctggacggtaagcgcttatggaaagagaaaaactattggcagatgcgaacgatttcggatacactttgcagagagtatggtttatcgctcattaagccggtacgccgaggtatgccgtatgcagcttggcgggcagagaaagaaggaaagccgaaccggcgtaaagcgctgcgcgaagacatagaacgcatactcgcaaatgaaaatatagaatcgctcgaagctttttacgatacgctgcgggcgtacgggtatgccgttatgacagatcgaaagtatgttgcgatttgtccgccgggcggtgaacgaaatattcgtttgcagtcgcttggagaaaactacgagccggaagcgctgcacttgcgcattctccgtatcaaagcagactggctgctcggcaaaactaaagttatagagcaaccgacgatgcaaaaaagaaaaatgcgcttgcgagaaacggtacgtcggaaatctaaagcgcatggaatacgagcgctttattacaagtggctttattatctcggcgtttttaagcggcgtcccaaagtatacggcagtgcgtttaccacggcgcgttggcagctgaacgcgtacataaagcagttcgattatgttgcaaaatataatcttaaaactcgcgatgacgtagagcagcggttacgcgtagtgcagcacgaaatctccgggcagatcgatgagcgggaagaaataagagccgtgctgcggtgtttggagacaggcgatgctgaaatacaggagcagcttgagaagattgagaagatcaacgcgcagctcaaaaagctgcgctcagaagcaaagctctgtgtgcaaatcctcgagcagcagccgcagatcaaatccaaaatcgacaaagcacatgaagtaaaaacatttgaaacagaaaggggaaaagaaaatggacgagcaagcgattatcaccttgagcatcgaaggaacgaagctgctcctacgcgggagcaaagaagttctggcagcgctcgtagcagcgattcgatacagcgcagataaaatgatcccggcgcgaaaatgccgggattttttgacgagtacatcggaggtgcgctttatctcgatgagcgatgaagccatcgaaacattcaaaaaggctgcacggccctatggcttacggtacttgcatttacacgacagcaacggcgatgggttatcgaccttaatggcgcgcggcgaggatgcagcagttatcaaccgtctgatcgagcgcaataaactggctgtgctgacggatgttacacaggcggaaatcgaacgtgatccgtctaaagcggcagatgtaaacgagctcccggaggtcgtgatcggaaaagatcaagtgcgggtacaggatgctgttaaggaggcacgcggcagcgcacaagatcttttaaagccggagccaaaccctacgaaaggacagacggaacggaaaagccgtctgtcctccgacggcttgaagacattcgtaacggaacaagagactgaagaactttgggcagatgttacggcatctattgataaggactttgcagagcgaatcgaagaaaagcgtcagcacaattttgaactttataaccaagacgacccgctgctcggcgagaaggttgtgaaaaccaaacgtaccgtgccggtacaagacaagccgtctgttatgaaaaagctggaggctgcaaaaaacgtcaacacgcaaaaagaagcgagaattgcggaagctgtgcgccagatgcaggcaggtggacgtacttcaaataccgataaggtcattcagaagacgccgaaggtgaagccgcaaaagctgagaaggtaggatggtgtgtatggcaatatcaaaagaagacataaaacctttggcttggtcggcggaggatgaaccaacgttcctcaaggacgacgaaaataaagacggaaaaagcggcaatgttgccggttctgcggatacgattttacgcacacgtcgcattttcaaaatgaagaagaattccggcggcagaaaaaaacaatcatggaaagcgctgaatacacgttgggtaagggcgcgggatgagatgttcgtcaacgagcgctttttggagaaagtgttgcagattatgggacgtatgcggtttggcgttaaaaactcaatgctgatcgcattgcagaatgagaaggcaacacgtattgcaacggctgcatcatggcgcggcttaggcgtgcagcttctgccgggtgcagaggcaaaaccaatatggttggatgcaggagcagacacgcagcgaaaaaccatagtaccgagcaaatggtatgacattacgcagacagatgccggagaaaaactgacgctgaaaggtacgatctataacacgcttgccatttgcaggatcactctaaatcagatcgacgagctaaaaatcatcgaacaacaaggtgtgacgggcatccactatgaccgtgaagtacatgcgtatcttgtgcagccggggcagatggaaagagctatgctttgctacgccgcgcttgaagcattggccgaaaaagattttgcgctggtttttcaggagaatgagaaaacagcgctgccggatacaccggcaaatgagatcattgcaaaatgtgcagcgtatattgtatgcgtacattttggcgttttgccgcaggaagtgtgtgtgcgcgtcccgacggcgctcggcacagataaaattgaaaatctgctgcgggcgttatccacagcgcagagcatcgcagcacaagaaattatggtgatcgaaaatcgacttcggtcaaagaaatggaggacaatatgatgaaaaatgaaaaagaattagcggcaagaagttgcttgtgtgtggaaccgagttcaccggaatgcagcgtaccttatatcgttacagaccccaaaggcgagttgcggcattatgagggaaaaataaaggaaaacggttataaaataattgtgagcgagttcaaaagatgagaggaaaaaatacattaacggcttggatcatggcaggcatcggggcggtatttgtgctttggcttgcggtgctgatcgcgccgtatgcagagggcggcttgcccgggattttgctgaacatgaatgagattactgcacatccgtttcggttggaactctgtgccgacacaggaaaagccgtgggcatatttctgggcggttatgcgttagtgcttttatacatatttagctcacagaagaattttcgccatggcgaggaacacggttcggcaaaatgggaaaacgtgtacctgctgaaccaccggctccacgacaaagaacacccggatgaaaaccgcatcttatccagacatttgagcatcacaacggatcagcgcaaattggataaaaacctatttacgcttgttatcggcggctccggctcacgcaaaacgcgagcgtatgtaaagcctaatttactgcaatgtaactcatcttatatcatcatggacccgaaaggggagttgctccgcgatattggcaatgtatttaaggtagagggctacaaaatccgtgtctttgaccttatcgatatgctcagcagttttcggtataacccattcgtctattttaaacgggaaagcgacatacaaggctttatcacgaacctatttgcaaataccgaggataaaacgaaacatggtggtgatgccttttgggacaagacggcgaaaatgatgctttcggcgctcatgtattacgtgtggtatgaatgcccggagacggaaatgaatttcggaacagttatggagctgatccttgccgagaccgtcgaagaaggcgatgaagccggtatttctgcgacacaggtgctcattgaggagctgcgtgccagaagcccgaggcatatagcggtgcgctactttgatgcttaccgtaagggtgcaggggagacgatcatgagtattcaggaatcgcttctcagccgcttggaaaagtttttgcttgaagacgtggtaaacctaacgaccggtgatgaattggaactcgaaaagatcggcgaagaaaaaacggcgctgtttatccgtatgccggacgacaacagtttccattttctggcatcggcgctcatcacacagctttttcagcttatgatggcacaggcagatgcacgcagcaccggcagcttacccgtgccggtgcattttgtgctcgaggaagcgcgaaatattacgttgccggacagcttccaaaactgggttgcgacgatgcgttcgcgcaacatcacattatcgattattctgcaaaatatatcgcagatcaagcgtatgttcccggacgactgggagtccgtgtccggcatgtgcgatgagatactatatctcggcggcaacgagcagagcacacacgaatggatttccaaagcgatgggacaggaaacgatcgataaccgtagctacggtacaacgcatagttggacgagcggcagcaacagcaccaatgagcaaaacagtggccgcgctttgatggatgtaacagaggtacgtctaaaaaacaagctgctgaaaggcaaaattggcagcgtaattatgatcttagccgatgagcggccgataatcgacgaaaaatacgacctgaaccggcatccgagaattaagctttcggccgacggcggtgcgccgcagtattcttatgtttcgtcagcgcttttgccggaaacgaacacaatacagatcaacgaaacagacgttgatgaagacgaggtggacggtatgtttacctttgaccttcaaaatgtcgaactaaattaaaggagcgattcacatgagaaagtttaatttgaaccgagtgggaaaatacgcacggtacgcatactttgcgatggcaagcgcaacgctgcttgctatcccctgctttgcaagcaccggtgtggcagagattgacacaccgattaacaatttgctgacgatgtttttcgggttgctgaaagtagtaggtatatttgtaggcttatttggtcttgtgcaaatcgtcatggcaggatttagccacgattctacgaagcgcattataggtgttacgtgtattatcggtggatttaccctttgcttcgcacagcagattctgacgttcctcggtatgacaacagcataaaagggagtgaactgctttgtatgaacttgtgctgcaatttttaacacaaatattcggcttgatgtactcggtgctgacggaagatctctcagattttagcccgcacgcatacgagtatatttcaattctgaatacgatattgaaagggtttgcatcatcactgatgcttgttgcattttgcgtagggtacatacaatccgccgtgtcgctgatcgagcaaaaaacgccgattgcaatattcaaaaccttggcgcggctcgtgatcgtcaatgctctggtggtacgcggtacggatataatcctcatgccgatgttctctgttgtccgcagcttaacaagccgcctgattgaggcgatgggcggacaagccggacttcttcccaatatagacgaaagctcaccgggcggtgttgccggtgcgataggcgagctgctgtccattaacatcctgaccggtattttatatattgcggtcattatcagcggtctggttttgctgctgacggtgttcgggcgttttctcaaagtctatgtctatatgtcgatagcgccggttccgttggcgttttttgccggtggaaatgtaaccgccatgtatggccgcaactatataaaaaacgtgttcggcgtttgcatggaagccgttacgatggtaatcgccatacagctgttttgcgcgatagcggatgatgctgtgatgacacaggtaggcgggatgttgggctttctgggtacgatggcgaaaccggtcatgctgcttctgtacttgtcgtctctcagcgccattataaaaggtgccgacaacatgacgcataagctgttgggatttgtgtaaggaaggagcgaaaagagttatgcaaatcaaagtaaaccaagaaatacgagatattaaagatgagttcctatccggtttatctgtgcgtcagactatttggagtgctgcagcgctatgtgcgggctttatcactttttggaatgtatatacgcgtttcggcagtaccgatatggcatcgttccttacgttatgcgcaagtgcaccgttggccttgataggcttttttaagtggcataaaatgcccgccgaacgtgtggcgttatgctggctgcatgcgctcttgatgcctcgcaggcttgtttttaagggcagcaatatacacgcaaatgagattgaacagctttgcacagccgcacgtgcggtcgagctgaatgaaatgaagaacagaagggagaaaggcaaagatgctttggaaaaagaccttgaggggcgcggagcagtatcaacagggaagcatgaaaattccgcgcagcacgcaggagatgatcccggtcaagcacattctgaatgatggtacattcgtacttgacagcggagaatattccaaaatgtttgcgtttacggacatcaactacacggagctgcgcgatgaagaaaagatgcgtcggcttgtggattattcagcactgctcaattctatcgataaaggcatttacgcgaagatcagtattttctttcgaccgatacggcaggagcagttcgagcgcgatgtgttgatcccgatgaacccggaagatgagttggatgattatcgggagaatatgaataccgtactgcgggaacaggtgcgcggtacgctcggcatgacgaagcaggcgtatctgacgataacagcaggacgaagaaatgatgaagatgccgcagcgttttttgctcgcgtggagggaaacttaatcagcagttttcaggcgctcggcgtggagctgcgtgctgtgcctttgtctgaacgtctgcgtttgctacacgatatttaccggccgggtttagaggaaactttccgatatgatgctcacgcagaaaaaaagctcggcatgaactggaaagacagcattgcaccgctcagtgcggaagctctcaattcctgtacgcatttgaagatcggcggccgatactgcaaaacgctgttcctgaatgcctatccgatatatctcaacgaccgcattgtttcggatattgcctctatcggcaagccgatgatctttacaatcgattttctgccgataccgagcgccgaagcgatggcggaggcggaaagccgcagtatggcaatcgatacgaaaatcgtaaactatacgctgcaccaacagcgcaacggcaattacagcggcagcgtgccgtataagctgatgcagcgtgcggcaggagtacaggaagtcatggaggctatacaggagcgcgaccaaaacttataccttgttaccgtcaccgtagcacattttgccgatacgcgggaagaactggaaaacgatgctgaaagcatcatgagcaaaggaaaatccatttcctgccagtttcttccgctccttgcccagcagtacgaggggctgaatacggcattgccttttgggcgtccgtttattcaggcggatcgattgctaacaacgcaggcgcttgccggtatttgcccgtttgcagcgcaggaaatctattatccgggcggctcgtggttcggtattaacgcaaagacgaaacgtctcattaccataaaccgcgatatgctgatgagcggcaacagccttgtgttggcgacgaccggcggcggtaagtcgttccacatcaaggaggacgctttgcaggtcgcactgaaaggggaggcagacatatttttcgttgacccggagtgtgagtatgttgtggcgacacaaaggcttggcggaacggtgatctccttatctccgtctacaccgcacaggatcaatccgcttgagatcagtgccgaccccgatgaccgcagcagcgaaccgttgaaagaaaagcttgaatttgtcatgtctttttgccgtatcttgcttatggaagatggcaacgtgcttgacggcaaaatgaaaagccttttggatcgttgtgtgcgaaagctgtatgcaccggtcgtggcatccggttatacaaagccgtcgccgctgcttggtgatctgtaccgtatgctgaaagagcaggacgcaccggaagcacaggaactggcgctgcgcatggaaatttatactgcgggttcttacgatatgtttgcgcagtctacgaacgtcgatacacaggcgcatatcatcgactatgacctttcaaagcttggtgagggtatgaacgcggtcggtatgctcattgtccttgaatcgatttacagccgcctaatggacaactggcggaaaaagaggcacacgtacatttatatcgatgagatcatgacgatttttcgtaacccatacgcggcacagtattttgcatcgctttggcagcgcatccgcaagcgcggcggttatatcatcggtgcgacccagaacacaacggaaatactaaacagcccggaggcacgtaaactgcttgaaaacagctacattatcacgatgctgtaccagtctgcaccggacagagacgtacttgcggaaatgtttagcctgtctgaggcgcagaagcaggcgcttgccaaggagcagtacggcacaggactcatcaaggtcggcagcacgattgtgccgtttgaaaacgatttcccgaccgataatcccttgtatcagctgatgtccacaaagccgtctgacggatgggggcaagaagtaaatgaacattacgacgtatgagaacacggtaaagaaaggcacgatcaaggcacacgggcgcagtgacggtttacgggaaatgtcggagcagctcgccgagatgcaaaaaatcgtcactgcaccgatgagcgtcgatacgccggagcaagatggggacaaagcgccggaaacggctgcggcggatcaagtcgtcggccgtgcaaaatcgacggcaggggcggtcagagatgctgtgacgagtgagatcaagcgcgctgtgcgaaagagtaaaaataaacccgttgaacgaggcgtgcaaccgttggcgaagagttctccgtggcgatcgacgtcgcgtgcaggaaatacggtgcaggcatcgtataaagttgcatccaagactgcgtatagaagcacctccgaagcagtgtcacatgcggcacgcgccggtgcgcaagctgcacagcaggcagctaagacggccactgtggagactgtaaaagctacggcaaccgtaagcgccggtgcagcgacggcgggaaccagcgtggccgtacaggctgcggccgaaacggctaaaaaggtaacggtcggcacggtgcaaaaaatacaggaaagtgcgcagacggctacggctgtgcatgcgcacgatatggcacgtgcggcgcagcagcacgtagcaaataaaacgaaagatgtacctgcgacggacgccaaaggattacctaaaattctcatggcaatttggatcggcatggttgtgctgttattagtcttttcaaacagctttggcagcttagcgagcagtgccggacgtgcgataaatctaaacgaccgcgtggaatcctaccgcgcatccattacatattgggcacaaaaagacggcatacccgaatatgttgaggttctattggcgctgtgtatggcagagaccggcattttggatgacccgggagacccgtttgcgtgttccgaatccggcttggcggtaaaacagccgaatggcataactgaccccgagtacagcattgagatcggtgtatattgctttagcctcaaggtgaaaaagaccggctgcaaattaccggcagacaagaataatttgttcaaggctttgcaggcatacaacatgggcgacggctttatcgatttctgcaatacgtattacggcggggtatggtcagtcgagtgcgcgagagcttattcggaaaaaatgggcggcggcagcacctacgggaacccgaattatatcgagcaatttttgcgctgctatacgttcggcacgatttcgggaacgtatccgggaagtctgaatgcacacggtctatgcgcaccgcttgagccgggatgggagcagaacatcacgcagcattttggtggtatgtacagcggttcgccgcacaaaggcatggacatcggtatgccggagggcacgccggtatacgcggctgcagacggcaaagtaaccgttgcaaatgcgtcggattcgtggggctactcatggggctattacgtcaaaatcaaccacgcagagggcgtagatacgctgtatgcgcatctatccagtgtggcggtatcttatgggcagtatgtgcatcagggcgacgtgatcggctacgtgggcagcaccggaaattcatccggcaaccacttacattttgaattgtatttagaaaataaccgagttgacccgtatccgtatatcgggacggatttactcagcaagtatctggaaaggacgttttaatatgacaatcaaacaggcttttattggaatcgttacggctattgcgcttgtgatcgcggtgctgatttcacagatcgtgcgcatcaacacaatgaccggcgacctgcaggaggcacagacacgtatagaaacattggagaccaaagccgctgcaacaccaaagcctacggccacgccggaaccgagcacagaaccgaccgcgacgccggagccggtggtctacgtggtgagcccggtcagcgagttcaacgcgtataacgtagaggcagcgccgtattactggctgcctgtcccggatgcagaggcagacgggacacttgaagccggaacgaatatgattgtgtccggcgtttgcggagagttttactacgctatgctgccggatggcacatatttctatattccgcagtcggccgtagcgcaagtgcctgaggctactccggagccgacaccggaacccacacccgagcctgcaccagagagtgtggtggaagcaactccgaacccttaaaaagttcaataccctttaatttaagggattgacagaataaagaaaatttgttatactacccttgaattaaagggctttttagattaggtgattttaaatgtctttcttgaatatcaaaaatacaattataccaagtgtaactttttcggggagaaatttacgtttagtgcgcgaatatgcagatataacgggtggcaaaggcgtaaatgtactcaattttattgttgacatgatgctggcaatgccggaaaaagtacgaatgaatttgcttgagttttgccaaatcaatatacagcaaattgagcaaaatatggctaaacgagagtatagtaacgatctcagcgtgaagcgtagggtcgcctatcaaagacttgagagatttttatcggacgaaaattgccaaatggatattccaaaaaaagaaaaaggcgaaaaaattaaaagaacaatagaatttacagcgacaaattacgggttagtaaaagaaaaagcaaaaaaagagaaaacaacatttggtcgatatgtaaactatctcattgttttgactttagatataccggaagaggtcaaaagtgagctttctgtctttagctctgcgtcgctaaacgaaacaattcagcacagtgaaagcaaaagccgttatataaatgaactgagtcgtgaaatgcagatgcactacaaaaaaatggaactcttctggtgtaataatcagcgtgcagcttttgatgggcataaaagcatgaaaaaaatagacatgaaagacgggtatattatatacccgagtgattgggtcgtgcttgaagatgtattacgtgatcccaaagagagctcacgtgcaagtgttgtagaggtctataacgggcgacgttatgggatgccacattttttgcttttttccaatatagcaaaaaatgaatcttacaccgaagacgaatttaaaataattgaagcagcgtgtttgagagcgaattcacggtttgctgatgttttaaaagacgaacagtcaatggtagatgaagaaaagccagtcgtgggtgtttttaatatcatagcgactgatgacccgtattatgatgaatttgatacgccgcctttcggctgcaaaatcatccgtgacataagtaaaagcaaagactaaatccataaaagctaacagactaaacgcaaaggaggggcaagaccgatgaacgacttttacgcgacattagaccttaatatcagcagccttacccctcgtagcgtaaagctgttagcttttttacaggcgcatgcagacaaagagggtgtttccttttggagcaaacgaaagacctgcgaggcgctcggaatcagtgaatcgacctatgcacgtgctttgcgcgagctgacgcgtgcgggcttagtggaagttaagccgcgctttgatgagaacggccgtcagcgcagtaatacataccgcgttgtgaacaccaaggggctcaaatatcgcgcagacatggatgatgtagagaagctgcaccaccgtgaagtgaaggtatacagccagatcatgctgcaaatcggtgaggatagctgggcgatttcccgccgcagccttgccgatgcgtgcggatgctctatgcgctctgtttcgcgccttgtagcagccttgcgcgataaggggatcctttgtgtgcgtgcggaagatcgcagttttatgggcaataaggggcagagcttcaatcgtttccgtcggtacaaaccggcggaacttttgcttttgcgctgtattttactcatgctgctttcttctttgaatacccccgtagtcaaatgtgacacccctatgaacccttacccccagctacagtttttatgcctgattaaggagaaggggtatacggtatttagagtttacaggaagaatagagtaaacaggaagaatcaactataccgcaagtataagcgtgcaaaagtggcgctttgcggtggggaaaggaatatcatgacagagatcatttatgcaaaaccgcagtacaagcagtcccgtatgccgggaaaagagctgtgttggcgtgtgccggaggacatgccgctaaaaaatgagaagtgggcattggttccgtgcaaggaacatctatatcttgtggaaatcttgcgcaaggagtgggtggaggacaatatagccgagcaataccgtcgtgtttacgcgataggcagcacacgagaagagttaaagccgccgatagggcgggtgcatctcatcgatgcagacaggatcgatatgcctgcgaagtaagctatcacgccgttgaaaactcgaagctttctaagccggacgtgatggagctgctgcaatatcccatcggtgtgacgcttgaaacgggcggtcgataccgtgtgtttctgggggcatatcggttttggtatctgcgggagtgcctgcactggacgaaaatcccgtgctatgtttacaaaatcaaacggcagatacgtgatcctcgtgaacggcgccgccgggaaattcatcgcaggcagcaggcggcagaaagtccgcgtatccggctccaactctatgagaattactacaagctgctgaaaggcatgaaggacgccggtgagatcaaaggcggtttacagacgcggctgatgcagcttctcggcgtctccgaacgcacggtgcgcatctataagcagctctcagaacaacttaccgggcgagaaaagcagcgcttaatgcgcggtaagctgccgtttgtgcaagcacgtgccattgccgcagagagaaatcaaaaagcggcaatgttgccggattttgaaaaagcagagaagaccaaagacaaaaacctacccgccggtagtggtgagtaggcttttccattttaaaaagcggcaatgttgccggttaggatatttatgtgctcgtatagtcttgacatattagctaatatatagtagtataatattagctaaaggaggtgctggaatgatctcagcaacagcaacagaaatgcagaataattttggcaggtatctaaatcttgttatttcgggtcaagaggtgatcgtaacgaaaaacggccatgaggtgggccgcttcgtccctaaagatatggcaatttcgtatcttacggattcgctgatcgggattttaaaaaatgatgctgaccttgatgaagtgcgaacagaaaggctgaaggaaaaatatgaaattgctgattgatgcgaatatcctgctcgacgttctgcaaaatcgagagaattttgttcgggcttcttctatggtgtggaaactctgtgagaccgaacaagccaaaggatatatttcggcgttaacatttgcaaatttagtttacattatgcgcaaagagatggatgcacagagaattgaagaagttcttcacatgctttctttaatttttgaatttgcagaattgaatgattcggatttatttcgtgcggctgctttgcaatggcctgattttgaagatgccgtgcaaagcgttacagctgaacgtattcatgcggattacatcataacgcgtaatgtgcgtgatttttcaagaagtaaagtcattgcgttcacaccagatgaattgcttgctcgtctttaatcaaaaagcggcaatgttgccggattttgaaaaagcagagaagaccaaagacaaaaaactacccgccaatagtgtgagtaggtttttgtcttataaagaacaactcttatgctgtaaaatttagtgctaaattagatgttgaatttatcgtaagatatgagtataataaaagtagattatgaaaggagtgggacaatatgccaaatatcaaacctatttctgatctgcgaaattacagcgatgttctgcgagacgtagctattggtgcgccggtttttctgaccaaaaacgggcgtggccgatatgcaattctcgatatgcaggattttgagaagacgcaggcaacacttcggttaatgaacgagcttgcaaaaggtcgtaagtccggcgaggagaaaggctggctgtcgttagaagacgtagaaaaaaagcttggggttacgaatgaataatttgcatttatccgcagaagcacaaaatgacctcatggagatcaaagcttatatcgaagaagatttgctgaatccctccgcagctttgacaacggtaagccggatcacaaaaagtttgcgagttttgcagaattatgcgtacgccggagcgttgctgtcttcgattgcggatatagagagcgactacagatttattgtaagtgggaattatatcagcttttatcgcgcttgtggcaatgatatttatatcgaccgtatactctatgctcgccgcgactatctacgaattctgtttccagaactataaagtgcttatatgggcgaaaagcggcaatgttgccacttttgctctggaaaatttgttgcagagacttatttgtatttcgcgttattttgagctcaatgagtttttgcactgggcgatgggaagcaaacagataatgactttgttctgcacagaacaatctacaaatcattctacaaatcttcaaacctcttttttgccggtctcgaatatagtatcaaatcaagatttactaaatctaaatttgttttatttggagataccctatatctattaaaaaaggtttcaaccccaaatgctgattatgcggcagaaaacgaaacgcagctctatacccttaatcaaatcgttcattacgcataaaaagcagaggatagcaaaggtaaaacctacccgccgatagtggtgagtaggtttttctattttaaaaagcggcaatgttgccggtttattgctgtacgcttgaaagacggcacatttgctcgtagagggatgtgtgatccgggtggacgtaccggcggagcgtaaaggccgggttggagtggccaatgataagagcaaggctttttgcgtccgagccgttttcaatcattcgggtcgcgaaggtatggcgcagcatgtgcggcgatacgcggcgaattccggcgcactttgaagtgtacaggcaaatgtgccgtaagtgaccggcgcttaccggttctgcatcgccgaatatgtatcggttagagctgcagcgcttagcccagccttgcagatgtgtgagcataagggcgacttcgggaatcaccggcacgctgcgaatgccgttctttgttttgcttttttcaacgcgcagaaccttggctttttatcccagtcctgccagcgcaggttttgcagctctccgcgccgcaggccggtcagaagaaaggtttgcagaatgaactgatctcgaatcgtgagttgctttgcagcttcttcaaacgcttgctgttcttcgtgtgatagcccgttgatgactttttccgaggcttttttggggacggtgacaccattgatcgggttttccgtacactggtgattctcaatcgcggtttggtaggccaagttataaagcgacttgatatgccgtaaagatgattttgcgtacttctttgataggtcgttcaaggctttttgaaatgtgaccggcagcagttcggtgagcagcgtgctttcgatttccgggaaacgccgcgataacctctttcgggcatctcggtagatttcgagcgttttcgaggcatattccggcacggcgtatacctcataccaaacatccagccattctccgatggtacagacttttctttccattgtaaacctctcctgttagataaaaattcccgttagggttaattcagtttaacagtgaaaggaaagaaaaacaaaaaccggcaatgttgccggtttcagcttgtcgatatagaaacagctctgcctatttatagtgctattgtaggagaagtgaaattttatgacaaaatcaaaatttgaaaccgaaaaagaaaagtggataaaacgcggtgagataaaaacatacaatatgactgaacttttgacctatgacgagaagcaaacagaagaccatttggccggtgcagaagtgtgtgcatatgcagcgtacacgtctcgcctacatgtgatgttgtatacggtacagacggtttggagtatcttaccaaacggggatacgggtgatgttattcgagaaaattataaattgttgcttgcattttgaagaattgaacggatgcggaaaaaccggcaatgttgccgttttttttctgtgtgaataaagatcttgccagaaaaggatatttctggtagaataaaaacgaactgcaatacgcagttcgggtgctgccataacggtggacggttggccctcagatgcggattttccgcaccgtgtgagggaacatttcttgaatatgaaaaaatccctcaatccaacacggagagagggatgatagacatgagtgattttgaacttttatctttggtcgtgatgaccgcgaacttaatcgtacaaatcctcatctacataaagaagaaatgagccgccctttgcccaaaagtgtacgactcattttttctgagtatcattgagggctaaccgttcatcggcagcactctttctatttctaattataaacgcttttggtgttttgtcaagcacaaaaaccggcaatgttgccggttttcgatgagagaaaaggcggagacgggttacgcggtgagcaaaatcgcgacaccttgttgaaaaatgcagaaaaattttattttgcgttgacgagcggggaaagaagtgctatacttttaaatagaaataaagaaaacgtccgctatggacgcttctcggtcgataaacgatctggtaaatcgtttatcgattccagatgttacaccatctgaaaacttcgcgaaaagacgccgataggacgttttttacaagaggggtgcttcatgtctaacacttagttagattatagcacaagccaaaagatatttcaaggcttttcagatgcttgtctggagagccttttttatttctgagtttgaaccttgacaatcaaatgaacccgcagacgagaatacccggcgcaaatcagtgtgcatgtgcgcacctctgcaaagggaaatacgcggataagcgcgaccggacaaacctgatcgtgccgcaggaacggcgtttgaaaacgggtcactaaaatcagaattattaaaacgaatgatctttgttttaatcgatgtgcatagctactatccagctatgcacatacattagaacaaagtttggtggaaacgcgcgggctcgaaccgcggacctcctgcgtgtgaagcaggcactctaaccagctgagctacgcttccatatcaactgtattatgtattctaccacagaaaatgggatttgtcaaacgctaatttggggatgacgtgatttttgcggagggatttacagaaagtttcagtaaactttcctttttccgacactgtatttaacgcgggggcagtatactgaaaacacagaatgcacggggaacgccgcaagtgggctgaaatgcggcggagaagcttgcctttatgtgtgttttatcggtggttagttattgaaactatacaaaccgaagtgagttttcatggattattgttagaaattagctaaaaacccttgaacttttttcttgttgtggtattattagtataaacattggtgcagagcgtcttttattaaattgaacggcacggaaaataggaaaataagacgctgtgcggcaaaaaattcggacggactgcgggtgcaaaaatgagaatggcatgcaccgccggcgtttgccgggatgttccgaatggaaaggacaggacgtatgagtgagatgataaacaaaacggcgccggaaggcaatgttccgctttatttgttccgcagcggcaaaaacagccattcctacgaatacatgggtgtgcacaacacggtgaaggacgggaaggcatgcaccgtgtgccgcgtatgggcgccgaacgcgcaggcagttgccattaccggtgatttctgtgaatgggatccggaaaagtatccgcttacaaagatcgacgacgcggtttgggagggctatacggacgaacccttaaaggaatttgatgcgtataagctcatcattacggcggaggacggcacggtgacgtataagtccgacccgtatgcgttccacgcagagacacgcccgggcacggcttcccgctactacgacatttcggggtacaagtggaacgacggccgctggtttgagcacaagaaaaaatacccgcattataaccagccggtgaacatctacgagatgcacgcgggctcctggcgcaaatatgcggacggcagcgtgttctcttacgacaagctcggtgacgagctgatcccgtatgtgcaggaaatgggctttacgcacattgagttgatgccgttgacggagtacccgttcgacgcttcctggggctatcaggtgacgggctactttgcgccgacttcccgctatgggacgccgaaggactttatgcgctttatcgaccgctgccaccaagcgggcatcggcgtgattatggactgggtgccgggacacttcccgcgcgacgaggccggccttgcgaaatttgacggcatgccgtgctatgaatatgcagacccgagaaagggcgagcacaaggagtggggcacgctggtgtttgactacggccgcacggaagtcatcagctttttgatgagcagcgcactgttctgggtgaaggaataccacattgacggcttgcgcgtggacgctgtggcctcaatgctgtaccttgactacaaccgcaaggacggcgagtggatcccgaataagaacggcggcaaggaaaatctggaggccattgcgttcttacaaagactgaacgaggcggttttcgccgaggtgccggaggtcatgatgattgccgaagaaagcaccgcgtggccgatggtgacgaagccgacttacatgggcggtctcggattcaattataaatggaacatgggctggatgaacgacatgttgcgctacatgtctttggatccgctatttagaaagggcagccacaacagcctgacgttctcgttcttctatgcgttctccgagaatttcattttgccgatctcgcacgatgaggtcgtttacggcaagggttctctctataataagatgccgggcacgccggaggaaaaggctgcaggcgtacgctgctttgcgacctacatgatggcacacccgggcaaaaaattgcagtttatgggcacggagttctcgcagcacgacgagtggaactttaacgaagaactcgagtggaatttgctgcaataccctgagcaccagatggcgcagacgttctttaaaaagctcaacgcgttctacctcggtcgttccgagctgtgggagatcgatttctcgtgggagggcttctcgtggatctcgaacgacgacgacagccagagcgtcattgcgttccgccgctttgaccgtgagggcaacgagctgattgccgtgtgcaatttcctgccggtccgccgcgagaattactgcatcggcgtgccgtacgcgggcgtttacgaagaggtgtttacttccgacgctgcggagtttggcggcacgggctttacgaacggcagcaacatccgcaccgtggatgaagcgatgcacggctttgagcagagcatttcgctgacgctgccggagaacacggtattcttcctgcgctgcaagcgtaaggcggcaaagaagcccgctgcgaagacgacaaagacgacggcaaagaagcccgcagccaaaaagcccgcggccaaaaaggcggccggcacaaaagccgcaaagaaaaaagcctgattcattttacatgaaacaatatacgggcggcggcaaaatgccggaacgctcgaaatctaccagagaggggatcatcagtcatgttacctaagcaagaagtagttgcaatgctgctggcaggcggccgtggcagccgtctcggtgttcttaccaagaacctcgcaaagccggctgttccgtttggaggcaagtaccgtattatcgactttccgctttccaactgtgtgaactccggcattgagaccgtgggtgttctgacacagtatcagccgctcgagctgaacgaatacatcggttccggccagccgtgggatctcgacagtatgaacgccggcgtacatattttgcagccgtacgagcatagcagcggctctgactggtacaagggcacggcaaatgccatttaccagaatatcccgtttattgagcgctacaacccggattacgtggttgtgctgagcggcgaccacatctacaagatggattactccaagatgattgcgtatcacaaggagcacgatgcggcctgcaccatcgccgtttacgaagtgccgatggaggaggcttcccgcttcggtattctgaacacgaacccggacggctctatttacgaatttgacgagaagccggctgtgccgaagagcaacaaggcttccatgggtatttacgtcttctcctggaagaagctgcgcgcgtatctggaagcggacgaaaaggacccgaactcctcgaatgacttcggtaaggatgtgctgcccaccatgctgaacgcaggcgagcgtatgtttgcgtaccgctttgagggctactggaaggacgtcggcacgattgacagcctgtgggaatccaatatggaccttttgaacccgaaggccggtcttgacctttcccgcgaagactggaaaatttattccagaaacccggtcatgccgccgcattacattgcaaagggcgcaaaggtgcagaactcactcgtagcagagggctgcaacgtatacggcgatcttgagttctccgtgttgttccacggcgtttatgtggcgccgaccgcgactgtgacggactccatcgtgatgccgggcgctgtgattgaagaaggtgcgaaggtgcagtatgcgatcgtggcggagaacgccgtcatcggcaagaactgcgtcatcggtaaacgcccggaggacatggaaaacagagacgattggggcgtggcggtcgtaggcccggactgcaagctctctgagggcaccgttgtggcgccgaaggaaatgatcgataaggaggcgcaggcataatgtttggaaataatgttttgggcatcatctttgcctatgcacacgaagaaagagtacgcgacctgacggagctgcgcgtgatggcttccgtgccgttcggcggccgttaccgtttggttgacttcaccctctccaacatggtgaactccggcctcaacaaggtcggcatcatcacggaggataactaccagtccttgatggaccacctcggctccggcaaggcctgggacctttcgagaaagcgcgagggtctgtacctgctgccgccgttcggcaaatcgacttcgagaaccgacggcaagatcgaatcgctcgattccattcgccgcttcctgaaaaattcccttgaggaatatgtgattctctccgattgcgatatggtctgcaatatcgattaccgcgaggcactggagcagcatgtgcgccagaacgcggacattacggtcatttaccgccatggcacttcgccggacgtagaccgcaacaacatctatatggtagaccccgagaaccgcattcgcgagttgcttctgcaccgcggaagcgagcacggtgtaaattacggcatcggcatgtatatccttagccgcgaactgctgcttcagctcgttgaaggatgcatgagccgcaacgaatatgactttgataaagatatggttcagcgcgtaattcccgaactgcgcgtgatgggttatgaatttaagggcattgcatatcaaatttcctcgtttgaagcgtactttaacgctaacatgggtttgatggatccgcgcgtgcgcgccgagctgttcaatccgaaccgcccgatctacacgaaggtgcgcgatgatatgccggcgaaatacggtttgaattcgtatgccaccaactgtcttgttgcagacggctgcgtgatagacggtgaagtggaaaactgtgtgctgttccgcggcgtgaagatcggcaaaggcgcgaaggttcgcaactgcgttatcatgcaggacacggtcatcggcgcgaacagtcggctcgattatgttgtggcggacaagaacgtggagattgaagagaaccgcacgctgatgggctatcagacctacccggtgtacattgcaaaggaaagcaaggtctaagctgccccgaaaaacgaaggaaaggaaagcggtgtaattgatatgaaagttttgttttgtgccagtgaagcgttgccttttgccgcaacgggcggccttgcagacgtagcgggttctttgccgcaggcgctgcgcgcacgtctgattggctgccgcgtggtgatgccgctgtatgaaagcgtgccgcaggaattacgcgacaacatgaagtttttaacaagcatcagtgtgccggtggcttggcgtcgccagtattgcggtatttttgaggcgaaggtaggcaatgtcatttactaccttatcgataaccagtactactttaagcgccaaggactttacggtcactttgatgacgcggagcgctttgcgttcttctcccgtgccgttttggagatgctgccgtacattgaatttaagcctgatgtgatccacgcgaacgactggcagacggcgctggtgccgatctactaccgtttgttctatgcaaacaacgactggtacagcggcattaagacgctgttcaccattcacaatatccagtatcagggccagtacggctttgagattctggaggacgttttcggtattccgaagagcgagcagagcttactcgaatacaacgactgcgtgaacctgatgaagggcgcgattgagagcgcgaactgggtctctaccgtgagcccgacgtacgcgaaggaaatcctcgacccgtggttcgcccacaagctggacccgattttgcgcgagcgcgcttggaagctttccggcattttgaacggcattgacgtggtgggctatgacccggcgacggacaagaacctgtatgagacgtatgacgcaaagcacctggagggcaaagccgtcaacaaggcaaagctgcaggagcgcctcggccttgccgttgacccggatgtgccgctcatcggtatggtaacgcgccttgtctcccacaagggccttgaccttgtaaagggcggcgtggacaacatcatgacgtactcaaacgcgcagtttgtggtccttggcagcggcgactgggagtatgagcagttctttaaagagatgcaggcgaagtatccgggcagatttgtgctgtgccagggctttgtgccggagcttgcgcgcaagatctacggcggctccgatattttcctgatgccgagcaagagcgagccgtgcggtctttcacagatggtggcgctgcgctacggttccattccggtcgtgcgcgaaacgggcggcctgaaggactccattacggacagcggcgacggcaagggcaacggcttcacgttccagacgtatgacacgcaggatatgctgaactccgtgcaccgcgcgatctacgcgtataacgagagcaaggacggctggaaagtgcttgtagagcgcgcaatggcgtgcgacaacagctggggccgctctgcaaacgattacattcgtttgtataagcagctcatcaacagctgatcttctaaaacgtctttcgagaaataagacggcgttttgcacgaccgtttgattaggtattgtagaaaatgaaaaatgccctgcttgtgtttttaagcacaggcagggcatttttgcgtttttatgttttggttatttctcttccgggtagcggacggggacaaactttgcgcggttcatgagggggtgctcgaggcggatggcaccgtcgtgcgggcacgccatgacgcatgcgccgcagtagtagcactcgccggggtagagcacgatggggtgcttgcctttttcgggcgaggggatgaggatatccacctgacagatgttgacgcaggcgttgcagccgacgcattttgtttcatcgtaaagaatcgggtgtgtgctgcacggcacgggttctgccgtgagaattttgttttgaagctcgctcatttccgatacgcccccttctgctcggttttgatgtaatccccgttgcgcttttcgtactcggtctcgaggtcgccgaaatagtagagcggatggctgccgtagatgacttcgccgttttcttgtcggacggtgatgaagcggcggtcgcgctcggggtcggtctcggtgctgtccgtgcgcttgaaaaacagcggctcggacgacgttttgcgggagaggcaggcgtgcaaaattaacttggagacggtcaaaatgtcaaaaacctcgtgcgcgcgcatgagctcgtgcgggtttttgcagctgatctgcgggacgatctcggtttcaaagctttcgagcaggtcgagaccctcatgcaaaagcgcatcgcactttacgccgccgcagtagttctgcatggctttggagatggccatgttgagttcgcgccaatccatgccatctgcgcggcggatgggggcgagcaggcgttcacgctcgtctgcggcttccgcttcattatagtcgggcagggtatcgagtgctttggcagctgcggcggctttgcggccggcgtagtagcccgtggcgcaggcgaaaccggcgcagtccgaagcgtagagctggtcgccggcggcgtagatgccgtcgatgtttgttttgaggtcccaatcgtgccaaacgccgcccggcgcgccgaacagctgccgttcctgctcaaggaaatttgcggactgccagcccgtgccgtagctttgcagcatgtgcttttgggggtcaaatccacgctccgtgtaatttttgaggatcggaatttttgttttgccctcttcgccgaccatcatgccccagatgacgcggcgctccgcgtcgggcatacggctgaggtctgcgtagaacggcagctggtagccgcggcgcatgagctcttcaaaatcgagcgtttcggggccgcggtactcgtacttcgggttatcgatgacgccgccctttaagaaaaatttctggccgggagcggggtagtagcgctcggaaacggttttaagctcattgccgtcgcggtcgacgtaggggatttccacgccgcgggcgtcgaccatcgttgcggcataccacgtgttgtggttattgcctgcgccgtagggcggaaagctgcggccggcggcggagaactcgcccttgacggatttttccatcatggtgaactcgatgccggccttgtagcccatggcgtggccactgccgatgctctgcatggggcggaactcgcacaggccggtcatatccgggttaaaaagccagacgcgcgccgggcggctcatggtgaggacagtctctttggcgcggagaatgtagaacttgccggtgcgcacgtccatggcgcaggcgcccgcgccatgctttttgccgttccgggcggtggtgagcaatgcggtggcttcggtgcggtcaagcactttcacgccaaggcgcagaagctccttgaaaagagcgggcttaaaggtgctgccccagacgcgcagagtgaatttatttttataatcgtaggcgaacatcagcttcgtttcgtcatcgcggaactctgcgcccttgaattcatcgtcggtgtcgcggactttgccgccgaacgactcaaggtctaatagacggtcgtagccctcgcggcactcgatgtagtgcgcgatgccgttagagtagccgcactgctcatcgacatacgcttcggcgatttccttcggcgtgacggtggagcaggggttcgtacaggcggattcccaatggtcgaaaccggtgcctgcgctgccgctgcgggcggtggcacctttttccactaagatgacggactgtccgcgccgtgccgccgcgatggcggcatagcagccggcaaggccgccgccgagcaccaaaacgtcgcaggaaagcgtttcggtgatgtctaattcatttttatatggccagttataggtctgcaaagcagatccctccttgtttgagtgtgaaaagcggagcttcagcaaagctttaggcggtgtgcgtctttttatgctttgcgtgcctgtatgcgagcaggcagatgatgctgcctagtactacgagcgccaagatcatcaaagcgcagtgcatgaaaaaggtatcgggcaaaatggtgatgacggggtctgttgcggcatcgaagatccaatagttgttatggaagacaatcttatggaataggacgaacaccgtttcccagtttaaggcgatgagtacaccgagcgctgcgggaatggagaccgttaaaatgccggaaagcagcagataccccgggttctttttaaaatggcggtagatgatgcccgcaaggctcaaaatgccgctgacgatgagcgtgatctcgaagacgccgaacacgtttttgacttcttcaaaatggatgcggccgctctcactcatggcaagcgtggggaaattcaggatcttcgtgccgaaaatggagttgtaatcgatgagcacgttgtagttctgcaaaatttcctcgcgcggcaggccggacatggcggtgatgtttaaatggtcaacgtcaaaataatagagcggacggaaattgagcgtgaagacgacagcggcgctgatgatgaacagcacgagcgcgacggcgagcacgatattgaaaacgaccgccaacggagatttttgaagtttatcagacacgggaaatacctccgaattttttatcttgcaaaggcagacccgcacggtgctttctgcggggacatgccctccgggatgggcttttctaatttttttgtggagacaaacgtcatacggtgtccctccttttttgaatttataggaaacatggtagcacaatccctgcaaaatcgcaaggaaaacgcgcaaaaagactatttgataacgcgaacttgccgaagcgctgtccgtttggcgtaaagcagatgacgcgcatgacggagattaaggattgcttcggtgaatgcgtttaaaaacaggatagatatgagaaaaccgtcgcataccgaaatttttccggtatgcggcggttttgtgttttttatgattctttgacgagcacatcgatgacttctgcgatgtacatttcgtggtagtccttgtccgggtaccagcgtccgtctacggtttcgtcgaggaactgctcgggtcttaacggcgtgcggctcattttgcggcagacgagcacgagctccgcttcttcaaaatacgcattgccgtttgtgaacgccggggtgaagccgacttttttgaccttgttttcatcgcggccggaaactttaccaaggtaggagagtgcgtcttttttctctgcggggtagaacgagagcgtgaaagtatcgcgggtatcgacaaactctttcgtgtagcgctgcgggcggatatacacggtgacggacggcttgccccacatgaagcccatggcgccccaggagacggtcatggtgttgaatccgttttcatcgccggcggtgagcagagcccactctttgccgatttttgtgaacgggtttaaagacagggagtcatacggtacggaacgaaatgccatttaaaacagtcctttcagaaaagatttacagaagtcaggcggtctgcttttgcggaccgcggttaataacgcgtttgatggtgagtgcgtagaccaaaatggagacgagcggcgggaaaatatccgagatgggctcgcagaagaagatctgctcgatgggcaggaagcgcggcaggatgaaaatgcacgcaaagaagacgaccttgcgaaaaaccgaaagcggcagcgcgattttgacgacgcccatgcccgtaaagccgtccacaatctcgtactgcatgccaagcagcacggtgccgagcgtgtaaatacggatgagtcgcgccgtcatggcaatgtattcgggttctttggtgaaaatgcctgcaaagagatgcgggatggtctgcgcggcgagcgtcatgagggcgcaaaagctgaccgcgatgacgaagatgtaccgctgcgcgcgaaggattttctccggacggcgtgcgcctaaattgtagcctaaaatggtctgtgtacccatggtgaggccgccgagcggcatggtgatgagcagctcgaagctttgcacgatggtgttgcaggtgaggagcatgtcgctgttgtcgccgccgtagcgctgaagcatcatgttgagcgagatgagcatgacgttatcgaaaagaataatgaggaacgcgctcatgccgatgctcgtcacacggccgatgacttttaaatcgtatccgccaaatgtgatgggaacttcgatatgtttgccgaacaggacgcacagcacgaacgcgcagcttgcaacctgcgaaatgaccgtggcgatggccgcgcccgcgacgcccatatggagagcgaagataaaaatggggtcgagcacaatgttggtgatggcgccgattaaaacggagaacatgccgctgcggctgtggccctgtgtgatgataaactggttcatgcctgtggcggtgagggcgaagaccgtgccgattagatagagcgaaaagtaggtctcggcgtaggggtaaacggcctcggtcgcgccaaacgtgagcaaaatggggcggcggaagatatatgccagcaccgtgacgggcacagcgagggccaaaatgtacacgaagcagtttgcgatgacttttttagcggcgtctatgttcttttctccaagattgatgctgacaagcggcgcgccgccgatgccgacgagaaacgcgaacgacgagatgagcgtgacgatgggaccgcacacgccgacgcccgcgagcgcctgcgtgccgttgctcgggatattgccgatgtacatacggtctacaatgctgtacagtacgctgacgagctgcgagagcatggagggaacggccaaggtccagacgaggcctttaatgttatccgacccgaggtcgtttgtgaatttcaaggaaaagcgcctcctcagtgctcgtggcagacttgaaaaatatagaacttgaggtaataggattcgtcggcactccacaaaatgggatgatccggcgactgggtgcggaactccacctgacgcaggcggcagtgtgcggcacgcgcggcctgcccaatggtctgggcgaagagctcggcgttcatgtagtgtgagcaggagcaggtggcaagatagccgccgtccttgacgagcttcatgccgcgcaggttaatctcgcggtagcccttgacggcgtttttaatggcgtttttggattttgtgaacgccgggggatcgagaatgacgacgtcgaactgcttgccctcgttttcgagcgcggggagcaggtcaaaaacgtcggcgcacttgaactcgaccgtatcggaaagatgatttagagcggcgtttttctgcgcctgcgcgacggcgagctcggacgcgtctacaccaaggacgtgctttgcgcccgcgatgccggcgttcagcgcgaaggagcccgtgtgtgtgaagcaatcgagcacatccatatccttgcagatgcgctgcatggcgagacggttatatttttggtcgaggaaaaagccggtcttctggccgtctttaacgtccacgatgtagcgcacgccgttttcgacgatcttgacatcggtgtcgaattcgtcgccgatgaagccctttttacggtccatgccttcttttaatcgctctttggcgtcgctgcgctcgtacacgccgcgaattttgatgccgtcttcgagcaggactttctttaagatgtcaacgatctgcagtttcattttatcgatgccgagcgcgagggactcgacgacgaggacatcggagaatttatcgatgacaaggccgggcaggaaatccgcttcgccgaaaatgatgcggcaggcggaggtatcgaccgtgcgcttgcggtatgcccaggcgttgcgcacgcgcatctcgaggaacgcgtcgtcaatctcctgtgacgcgtcgcgggtgagcatgcggatgcggattttggagttctggttgatgaagccgcggccgagcgggcagccgttttgctcctgcacggtgacgacggcgccgtttttgaacgtgccgtggatgctttcgatctcgttgtcatagatccaaagaccgcccgctttgaaagcgcggccttcgccttttttgagtgttacaatagtttcgttcatagatgggttccttttatatagttgagatgggggagctttttctaaaggcttgcagggcaagcctttcaagggacctcctaattgagtcccttgcggttcaactgtccaccggacagttctagcaatgcgaagcattgcttactatcactcctgatttttgggtaggcaaaagggtttcacctttggaatctgaccgactttttgaaaaaagttggatcaaaagcttttaaccaacgctttcggagagattggcgttcgctttttccgcttcgatctgctttgtgactttcttaatgcagtgcaggcaggtgggggtgatgtagagcacagcggcgatccacgcggtttgatccgagaaacagatagccgtatagccgaacgcgccgacaaaaccgaggctgacgatggagcgcgcgaacatttccgttacgccggagaataccgcgcggccggagaagccgatgccctgtgtcgccatgcggcagatgttgaggatgccgagactccagaagaagtagcccatgcagcgcagatattttgcggaagcgtcgagcacgtcgcctgcactcgattcaacaaagagcgtggacatgctgcggccgaagaagatcatgacaaggccgatgcagaagccgtaggcgacgccgacgatgacgccgagccgtacgccctgccgaatgcgctccggcttttttgcgccgagattctgaccgcagaagacggaaacagcagagccgagggcatcaaacgggcacatgcagaactgctttaagcgcataccggccgtgaagcccgaaacgtacacgctgccgaggccgttgtttgctgcctgcatgaccatgctgccgatggccgtgatggaggtttgaagccccatggggatgcccatgacgacgaggtcacggatggattcggcatccgctttgcagtctgcgcgggaaagcgtgaggagcggcacgcggaagcggatatagatgaggcacaaaatgccgctgaccgcctgcgctgcgatggtggcgatagccgcgcccgcaacgccccacttgaagacaatgatgcagagcaggtcaagaccgatattcaggacggtcgagatggcgaggaacaggaacggcgtgcggctgtcaccgacggagcgcaggatgctggagagcagattgtataataaggtaaaggggatgccgaggaaaatgacgatgagatacgcgtaggcgtcgtcaaaaacatcctgcggcacggagagcatttgtaaaatgagcgtgcagcacagtgaacataccgccgtgatgagcaccgcgaataaggcggtaagcagcacggagttgaaaatgtacgaacgcattttatcaagacgctctgcgccgaagcttttggcgatggggataccgaagccgatgcagatgccgatgcagaaaccgagtaccagaaactgcacgctgcttgtagcgccgacggcggcaagtgcgccggtgccgagcacacggccgacgatggcggcatcaaccagattatacatttgctgcaagaggttgccgagcaaaagcggcaccgcaaattgcaggataagcttgaggggcttaccctctgtcatactttttgtcacgaaaatcacccgaaaatacatagtctcttttcaaccttcttattttatcataccttttttattttggctatggcagaactgcggattttgcacgttgttttccacactttttgcgtgaattgcggaaaaagcgcccgatttgcgaaaaaaggaaaaaacgatgggagaaaagatgtttcctgcaaaacttacaaaagaaaaattttgacaaggcggtcgaaaagcattgacaacgagaaaaacgggtgttataatctattcaatttcataacaaaaagcgatgacgaagactgtctgtgcagagctgtttcagagagccggtggcaggtgtaaaccggtgcagagatgcagagatttctcccttccgagccggatgcctgaacagcgaattcagtagggtatcccgtgattgctacgtcagtgcatagaagttattggacttcgaagagtggcggaggttctccgcaatttgagtggtaccgcgagtgcataatttagttattacacccgtctcaaagcataaacggctttgaggcggtttttttacacttcaaagcggaagaacaaggaaacaagctgcaagtttgaaagcacaaactttcaaattcataaggctttaaaccgaacacagcaggaaaggcagaagaacatgttatcattagacaaagtatttgatgcacaaaccgttctaaagagcatcatccgcgaaacaaacgtcgtgaagacctacggcatcgcgccggattgcgacctgtacctaaagcccgagaatttgcagatcaccggctcttttaaggtgcgcggctctgcgtataagatctcccagctttccgcagaagagaaagcgaaaggcgttattgcctgttccgcgggcaaccacgcacagggcgtggcgctggcggcaacgaaaaacggcatcaaatcgctcatctgtctgccggactccgcaccgatttccaaggtggaggccacaaagggctacggtgcagaggtttgccttgtggagggcgtttacgacgacgcgtataacaaggcgattgaattgaaagaaaaagagggctatacgttcgtgcacccgtttgacgacgaagacgttatcgcgggtcaaggcaccatcgcgctggaggttctgaatgaccttgacaacatcgatgccattgtggtgccggtgggcggcggcggactcatctccggcattgcgtataccgcaaagcacatccgcccgagcgtgaaggtgtacggcgtacagatgaccggcgcaccgagcatgtacaactccattcacgacggcaaaatcgagacactcgacactgtgcagaccgtggcggacggtatcgccgtaaagcgcccgggtgacaacacgtttgagattgtcaaaaaatatgtggatgacatcgcgctggtgagcgaggacgaagtttcgagcgcaatcttggcactcatcgaaaagcagaaaatgatcgcggagggcgcgggcgctgcttccgttgccgccgtgatgttcaataaatttgatttaaagggcaagcgcgttgtgtgcatcgtctccggcggcaacatcgacgtgacgagcctttcccgcgtgattgaccgcggcctgatgaactccggccgttccgcgagcctcctcatcgagcttatcgacaagcccggtcagctcaaggagatctcttcgatcatcgcggactgcggcggcaacgtgaccggcgtgcactatgaaaagggcaacaccgaaagcattaacggctgcttcctgcgcatcgaaatggagacgcgcgacaacaaccatgtgaaaacgatcaaaaacgccctgcgtgaagcaggcttcagaaccaccaagggttgagaggagaaagcaaaatgatggacgcaagcaaatataaggtcgggtacttcccggtatcgaaagaatataacaagtgggtggaaaaagaccacattgaaaaggcgccgatctggtgcagcgtggatatgcgcgacggcaaccagagccttgtcatcccgatgagccttgaagaaaagcttgaatactacaaagtgcttttgcaggtcggctttaaggagatcgaggtcggtttcccggcggcgagcgagacggaatatgagttcctccgcacgctgattgacaacaacatgattcccgaggacgtcaccgtgcaggtgctcacccagtgccgcgagcacatcatccgtaagacattcgacgcgtgcaagggcgcaccgagcgcgattatccacttctataactccgtcagcgttgcacagcgcgagcaggtgtttaagaagtccaaggaggagatcaagaagatcgccgtagacggcgcgaagctcgtcaaaaagcttgcggccgaatacgaaggcaacttccgctttgagtattctccggagtcctttacgggcaccgagccggaatacgcgctggaggtctgcaacgcggttctcgacgttctggagccgagcgagacgaacaacgtcatcatcaatctgccggtcacggtggaaatgagcatgccgcacgtgtatgcttcgcaagttgagtacatgagcgagaacctcaagtaccgtgaattcgtgactttgtctctgcacccgcacaacgaccgcggcacgggcgttgcggacaccgagctggcgctccttgccggcgcagaccgcgtagagggtacgctgttcggcaacggtgaacgtaccggcaacgtggatatcattacgcttgcgatgaacatgtactcccacggtgttgacccgaagcttgacttctccgacatgccgtaccttgtggacgaatatgaaaaatgcacgcgtatgcatgtgtacgaaagagccccgtatgcgggcgcactggtgtttgcggcgttttccggcagccaccaggatgcgattgcaaagggcatgaaatacagagcgaaaaataagctgcatcagtggaacgtaccgtacattccgatcgacccgaaggacatcggcagaacgtacgacgcagacgttatccgcgtcaactcccagtccggcaagggcggcatcggttatctgctggagcagacatacggctataacctgccgccgaaaatgcgcgagcacttcagctatctgtgcaaggatatttccgaccacgagcacaaggaactgaagccggatgaggttctgaatatctttgaagagaactacctcaatctgacgaacggtgttaccgtgacggattttgagtttatgcgcgacaaggacaacgtgaagatcggcatcacgttcgcgaaggacggcgaagagaccgagatggaagcggagggcaacggctccctcaacgcgatcaacaacgcgctgcgtgcgtacaccggtgcagagtacaccctgcaggtctttacccagcacagtatgcaggggcagggctcgcagagcgtggcggcttcgtacatcggccttgaaaaggaagacggttcgatgttctggggcgcaggcaccgacaccgacgttgtaaaggcgaatacaaaggcgctgttgagcgcttacaacaatatgatcaaagggggagactaaaatgaaaatgaccatgacgcagaagatccttgcggcgcacgcgggtctccgtgaagttaccgccggtcagctcatcaatgcaaagctggatatcgtgctcggcaacgacatcacgacgccggtcgcaatccatgagtttaagaaagcgggctttacggacgttttcgataaggacagagtgacgatcgtactcgaccactttgtgccgaacaaggatattaaggcagcggaacagagcaagacgtgccgcgagtttgcgtgcagccactgcgtgagccacttctatgacgtgggcaagatgggcattgagcatgcgcttttgccggagcagggcattgtgaccgccggcgactgcatcatcggcgcggacagccacacctgcacctacggtgcgctgggcgcgttttccacaggcgttggctctacggatatggcagccggcatggcaacgggcatggcgtggtttaaggttccgtccgcgatcaaatttaacctgaccggcaagctgccggaaaattgcagcggcaaagacgttatcctcacaatcatcggcatgatcggcgtggacggcgcgctgtataagagcatggagttcaccggcgagggcgtgaagaacctctccatggacgaccgcctgtgcatctgcaatatggcgattgaggccggtgcgaaaaacggtattttcccggtggacgatattacgcttgcctatttacaggacagaagcgaacgcgagccggttgtatacgaagcagaccccgacgcggaatacgaaaaggttatcgatatcgatctcgcaaagattgtgccgaccgtcgcctgtccgcatctgccggagaacacgcacccggcaagcgagctgcacgatattaaggtcgaccaggttgtcatcggcagctgcacgaacggcagaatggaagacatggaagcggcgtacagcattttgaacggcaagaagattgcggacggcatccgctgcatcatcattccgggcacgatgcagatctaccgcgaatgcgtggagcgcggctacgtgacggcatttatcgatgcgggcgctgttgtttctaccccgacatgcggtccgtgcctcggcggctatatgggcattctggcagcgggcgaacgctgcatcgccacaacgaaccgcaacttcgtcggccgcatgggtcatgtggacagcgaagtgtacctggcttctccgcacacggcggcagccagcgcgctgaccggctacatcaccgaatataaggaggcgtaagcatgaacacacagggcaaggttttcaaatatcccgataacgtcgatacggatgttatcattcccgcacgttacctcaacaccccgaacgcacaggagcttgcgctccactgcatggaggatattgacaaggcgttcgtaaagaaggtcgaaaagggcgacgtcattgtggcgggctggaacttcggctgcggctcttcccgtgagcacgcaccgctcgtcattaaaacctgcggcacgggttgcgtcattgcaaagagctttgcgcgtattttctaccgcaacgccatcaatatcggcctgccgattctcgagtgcgaggaagcggcagacgagatcaacgcaaacgacgaagtttcggtcgattttgataccggcatcatcaccgacatcacgaccggcaagacgtataaggcacagccgttcccgccgttcattcagaatatcatcaaagcaggcggcttgctgaagtccctcaaggaggcggaaaacaaatgacgaagaacatcgcggtgatccgcggcgacggcatcggcccggagatcgtaaacgaagcgctccgcgtgctggataaaattgcagagctgtacggacacacctttcattatacagacgtcgatatgggcggctgtgccatcgataagtggggcgacccgctgccgcaggaaatgctcgataagtgcgtagcttccgacagtgtgctgctcggcgccgtaggcggcgacaagtggaacgacgtgccaggcccgaagcgcccggaaaagggtctgctgcgcctgcgcgcgggtatgggtgtttacagcaacaaccgcccggcgaagatctggccgcagctctctgacgcttctccgctgaaaaaatctattgtcgaaaagggcatcgatttcatcatcgtgcgcgagctcatcggcggcatctattttggcgagcataagaccgatgatgcagacggccagccggtcgcgacggacattatgaagtacagtgaagcggagatcgagcgcatcggccgcatcggatttgagacggcaagaaagcgcaatcaccgtttgtgctccgtagaaaagagcaatgtgctcgacacgagccgcctttggaagaaggtcatgcaccgcttggcggaagaatacaccgacgtggagctgaccgatatgctcgtcgataactgcgcgatgcagatcgtgaagaatccggcacagttcgacgtcatcgtgacggagaacatgttcggtgacattctttccgacgaagcttccatgatcaccggctccatcggcatgatcccgtcctcgagcctcggtgcaacgagctgcggcctgtacgagccgatccacggctctgcaccggacattgcgggtcaggaccttgcaaacccgatcggcaccattctttccgccgccatgatgctgcgttacagcttcgatatggcgaaggaagccgatgcggtggagcatgcggtttccaagtaccttgacgcgggttaccgtactgccgacattatggaagacggcatgacgaaggtcggatgcaaaaagtgcggcgacctcattctcgaatacttaacgaaggagtaattgaatgcagcttacaggtgcagatatcctcatcagaactttaattgaacagggctgcgacaccgttttcggttatccgggcgggcagatcctgaacgtttacgacagtctttataaatatcagaatgaaattcgccacatgctgacggcgcacgagcagggcgctgcccacgcggcggacggctacgcaagagcgaccggcaaggtgggcgtggtgatgtccacctccggcccgggcgcaacgaaccttgtgaccggtattgcgacggcgtacctcgattccatcccgcttgtcgcgatttgcggcaacgtgcccacgacacaaatcggcacggacagcttccaggagatcgacattacgggcgtgacgctgcccattacgaagcacaactacttcgtcggctccgtggagaatctggcggacaccatccgcgaggcgtttgcgcttgcgcagtccggcagaccgggcccggtgctcatcgatgtgccgaaggacgtgcagacagcggtctgcgactacgagccgcaggcacccgtacagcccgaagaacgccacgcggcgaaggacgtgcgcatcaaagaagccgcggcgctcatcaacgcctcgaagcgtccgttcatttacttcggcggcggtctcatcacatcggaagcacaggaagaaatgctggcgctcgccgagaagattgacgcgccgatcggctgctccttgatgggcctttccggcattccgaccgaccacccgcgtttccttggtatgcagggcatgcacggccactacgcttcctccatggcgatgcacgacgccgacctcattatttcgctcggcgtgcgctttaacgaccgcgtgacgggcaaccgcgagaaatttgcgaagcttgcgcagatcatccatattgacgtggacggctccgagctctcgaaaaccgtgaactccgcctgcggcctgcgcggcgacgtgaagctgacgctgcaaaagctcattccgctcgtcaacgcagagcagaagcccgactgggaaaaggccgtgaaggccttaaaagaaaccgaaaacgattatctcgatattcgcccgggccttacgccccgcaatgcgatcatgacgctgaacaagcacctcggcgagaataccgccgttgcaacggacgtcggccagcaccagatgtgggcggcgcagaacgtgagctttaaaaagccgcgccgcttcatttccagcggcggcctcggcaccatgggcttcggcctcggtgcggccatcggtgcggcggtcggcacaggcgagcgcagcgtgctcgtcacgggcgacggcagcttcggcatgtgtctcaacgaactcaccactgccgtaacctacaacgtaccggttgtcatccttctgatgaataacggcgtgctcggcatggtgcgtcagtggcagacgctgttctttaataagcactattccaacacgatccttgaccgcaagaccgactttgtggcgcttgcgcgcgcgttcggcgcggacggcgaggctgttgataccgtggcggcgctcgacaaggcgtttgagcacgcgttcagctgcgacggcccgtatgtcatcgattgcagaatcgataaggacgaattcgtcctgcccatgctcccgccgggcggcagcatggatgatattatcatgaaggtgggtgaatgagatgaatcgatataccgtagcggttctggtcaataaccagttcggcgtgctgaaccgtgtgacgagcatgttcagaagacgtcagttcaacatcatttctctgaccgtcagcgaaacggaatcgaacgcgctttcccgcatcaccgtcacgtttgagggcggcgagacgcagaagcagcagctcgtgaaccagctttataagctgccggacgtttgctccattaaagagttcaccccggacacctccgtcagctgcgagctgatgctcattaagctgaaaaacgattccaaaacgcgcagtgacatccttgccgcggcggacgcgttcggcgcgaagaccatggattactccaaggattccctgatgctttgcctgacctccgaatcgcgaaaaatcgatgaattcgtcgatttgatgcgcgactacgagatccttgagatctgccgcaccggcaatgtttcccttgaaaagggcagcacgacgatccgtcaggccatcaatttctaatttagtttgtccatttaaattaacataccaattcatgcacagaaagaggtaatttatcatggcaagaattttttatcagcaggattgcgatctgcagaagctcgcaggcaagaccgttgccatcatcggctacggctcgcagggtcacgcacatgcactgaacctgaaggacagcggcgttgacgttatcgtcggtctgtatgaaggctccaagagctgggcaaaggccgaggcacagggcctcaaggtcatgacaagcgccgaggctgcaaaggctgcggacatcatcatgattctcatcaacgatgaaaagcaggctgcactgtacaaagagagcattgagccgaacctgaccgagggcaagaccctggcatttgcacacggctttaacattcacttcggctgcatcaagccgccgaagaacgtcaacgtcatcatgatcgcgccgaagggcccgggtcacacggtcagaagcgagtatcaggcaggcaagggcgtaccgtgcctcatcgcggtcgagcaggatgcaacgggcgacgcttgggacatcggcctcgcatatgcactcggtatcggcggcgcaagagcaggcgttttggagaccacgttccgtaccgagaccgagaccgacctcttcggcgagcaggcagttctctgcggcggcgtttgcgctctgatgcaggccggcttcgagacgctggttgaggcaggctatgacccgagaaacgcgtactttgagtgcatccacgagatgaagctcatcgttgacctcatctaccagagcggctttgccggcatgagatactccatctccaacacggcagagtacggcgattacatcaccggcccgaagatcatcaccgaggagacgaagaagaccatgaagaagatcctgaaggacattcaggacggcaccttcgcaaaggacttcctgctcgacatgtcttccgcaggcggccaggtacacttcaacgcaatgcgcaagctggcttccgagcatccgagcgaggctgtgggcgcggatatccgcaagctgtacagctggagcgacgaggataagctcatcaacaactgatttgaacggaatctgttttaaggggatagccataggggagttttcctctatggcttaaaccctatttacacacggcgcgtttttccatgtgggacgccgcgccacagccaaaatttcacggatcgaggaaataaaatgaaaagtgattctctgaaaatcggtacgcagaacgcgccgcaccgtgcgctgtaccatgctctgggcctcacggaggaggagatcgaacgtccgctcgtcggcatcgtcagctcctataacgagatcgtcccgggccacatgaatatcgataagattgtggacgccgtaaagatcggcgttgcgatggcaggcggcacgccgattgtcttcccggcgatcgcggtatgcgacggcattgcaatgggccacaccggcatgaagtattcgctcgtcacgcgcgacctcattgcggattccaccgaagccatggcattggcacacggctttgatgcgctcgtcatggtgccgaactgcgacaagaacgtgccgggccttttgatggcggcggcacgccttaacgtgccgacggtgtttgtcagcggcggcccgatgcttgcgggccacgtagacggtgcaaaaacgagcttctcctccatttcggaggcggtgggcgaatttaacgccggtaagattaccgaagaaaagctgcgcgaatatgagtgcaagacctgcccgacatgcggctcctgctccggcatgtacaccgcaaattccatgaactgcctgactgaagccgtaggcatgggtctgcgcggcaacggcaccatcccggcggtatattccgcacgtatcgagcttgcaaagcacgcaggcatggcggtcatggatatgctgagaaagaatattcgcccgcgtgacatcatgacgaaggacgccattatgaacgctcttacggtcgatatggcactcggctgctccacgaacagtatgctgcatctgccggccatcgcgcacgagtgcggcatcgagatcaacctcgacatcgcaaaccagatcagcgaaaagaccccgaatctgtgccatctggcaccggcgggcagaacgtacgttgaagagcttgacgaagcgggcggcgtgtacgctgtgatgaacgagctgagcaaaaagggtctgctgcacacgaactgcataaccgtgaccggcaagaccgtcggcgagaacatcaagaattgcgtgaacctgaaccacgacgttatccgtcccatcgagaatccgtacagtcagaccggcggcatcgccgtgctgcgcggtaatcttgcgccggagggcagcgttgtaaagcgttctgccgttctgccggagatgcttgtgcatgaaggcccggcacgcgtgtttgagagcgaggaggacgcacaggcggccatcaacgcgggcaagatcgtaccgggcgacgtcgttgtcatccgctatgagggtccgaagggcggccccggtatgcgcgagatgctgaacccgacctctgctattatgggtatgggtctcggcaacagcgtggcgctcatcacggacggccgtttcagcggcgcaacgcgcggcgcgtgcgtcggccatgtttccccggaagcggcttccggcggccccatcggcgttgtggaggaaggcgacatcatcagcatcaatattccggagaacaaaattgagctgaaggtggacgaggctgtcctcaatgaacgcatgaagaactttgtgccgaagaagaaagagctttccggctacctgaagcgctatgcggcgctggtctccagcggtgcttcgggggcgattttgaactgatgggtagtttacaggagttgagcatccgcctttccacgctggcggtgttcagagaattacaggaagatgcggttataaatagtctgcgtaagtatctcgcagagccgtccccggcgctgtatgcgtcgttcgtctctgcgctgtaccgcgcaaacggcggcatactcggcgcgtatgtgcgcgaaatctgcgaaaacagcgagaacgtctacgtgcaggccgtgggcaaaaaggaagagatccccgcttacctgcgcgaggccgttttggaagagcttaaaacgctgcagatgacggcggagctcacgccggaaacgctgcgcagcgcgatggagtataggggctttttacccggctttgtcagcgaagcgccggacattaaagcgtgctacacagagcgcaccgagaacatcggcaagtacggctacggcatttacgccaaaaaccgtatgttctaccttggcgagaatgccgagatcgtgccggtcagcaacccggacaagacggagctttccgaccttgtggattacgcccgcgagcgccagatcatcatcgataacacaaaggcgctgctcgaaggcaagcccgcagcgaacattttgctgacgggcgacgccggtacgggaaaatcgtctacggtgaaagccgtcgtcaatgcgctgtggcgcgagggtttgcgtatcatcgaggtgcgcaaggatcagttacagtcgatcccgaaaattctcgatgagctttctgcgaacccgctgaagtttattctgttcatcgacgacctttcgttcctcaaggacgacgataacttcaatgcgctgaaggcggtgctggagggctccgttacggcgaagtcgcagaacgtggcaatctacgcgacgagtaatcgccgccatatcatcaaggagaagttctccgaccgtgagggcgatgatattcaccgcaacgatacgatgcaggagcttgcatcgctttccgagcgcttcggcatccacgtgacgttcagcaagccgaacaaggacacgttcctgcacatcgtgcgccaccttgcggaggaaaacggcatcgatatgccgacgcaggaactggagctgctcgccgagcgctttgcgctggagcgtggcaaccgctccgcgagactcgcccgtcagttcatcgacggactgctttccaaggcggaataaaaaccttatacagtagactgtttttgaagcggcacctttgctgctaaaacacgaaacgaaaaatgctcccggtttttagctggttgctcataaaaaagtgaatccgacctatggctgcaatcaaaggtcggattctttttttatgttagggctggaatatccatggctccctctgacgcgggaggcttggatgcggtgcaaaatcgcacattaccgcactacaccgaatggtgtatagaagtgcgcccttactgtttgacaaattggaattgattttcctttttatttcttagtatcaatccaaatgaaaactctctcgtcagttctttcagtaacaacacctccgtttgctattgccacagcttgagatgctatgttatctaaaagaatggttactaacactttatctattcccatttctttcgcttcattaagcaataatctcagcagttcttttccatatccttttccacgaaacgctggtgcaattccgtacccgatatttcctcctgcttttctcagtgcctcagtcaaaaaatgtctgacagaaccaaatccaaccggaataccatcagcatatagccaaaaagttgtagaaggcactttccaaccatctacaatcccttcttgctcagaatccctctgttttacaatcagccattctttatactcatcaaatgttaatccgttggctttgttaattaatccattttcttcagcagggatctcttgcagcattgtgtaaatatctaagccatcatcaactgacaatctttttaattccaacattattttcaattctccttaatcaaataaactcaagtttatcagtctgtttaatcatatcatatggcttcaatgtacggcaagaacaatcccggcagacattactgccgggactgatgctgttttatggacatctacatttatgccgggagcgtttttgtgtatacaggtaaattcgattttacaaattgctgtggcggcggctcgaacccgtttgcagggtactgccgaggctggtgatgcaaaggcgtgttgcgatgaggaacacgccgggaatgacgataatccaccacgcgttcgtgagcagagccttttcgccgacagaaacgcgttacgcttcgtattcgccgcgaatgtcttcttccggggcgggaatggggtagtcgcccgtaaagcatcccgtgcagatgccgagaccgttcaccatttccggcagacgctctaaacgtaaatagccgagcgtatctgcgccgatctccttgcagatttcgtcgaccgtgtgattataggcgataagctggtggcgctccggcacatcgatgccgaagtaacacggccacaggaacgggggcgagctgatgcgcatgtgcacctcttttgcgccggcgtctttcagcatgttcacaatctggtcgctcgtcgtgccgcgcacgatggagtcatcgatgaggatgacgcgcttatccttgacaacctcgcgcaggacatttaatttaacgcgcacgctggattcacggctgctctgcttcggtttgatgaatgtgcggccgacgtagttgtttttcacgaatgccgtgccgtaggggatgccggattccatggcgtagccctgtgctgccgcgttgccggattccggcacgccgacgacgatgtccgcatccacgggggaatctttcgcgaggaaacggccggcaagcagacgcgcggaatacacgttgatgccgtcaatgtggctgtccgggcgggcgaaataaatgtactcaaaaatgcagcgcccctgcttttcggcggggaggcagtgcgatttgtcggagagaatgccgttcggcgtgatggtgacaatctcgcccggctctacgtcgcggacgaattccgcgcccacggcgtcaagcgcacaggtctcgctggagaggaaatacgtgttgtcgcgcttgccgatacataggggcttgaagccatagggatcgcgcgcgccgatcaacttgcggggggacatgaccgcgagggcataggcgccctcaattttgtccatcgtgcggctgacggcctcctgcacgtttttcgtctgtacacgctcgcgtgcaatgtagtaggcgatcgtctcggaatcaatggtcgtctggaaaatagcgccgctgtactttagtttttcgcggaggtcaacggcatttgtcaggttgccgttgtgcgctacggccaacgtgcccttgatatagtggatgatgagcggctgcgcgttttcgcggttgctcgcgccggcggtggagtagcgcacatggcccacgccgatattgccgtgcaggcgattgagacgctcctcgtcgaatacctcgtttacaaggcccatgtccttgtagtaatccaccttgcctttggggccctcggtgtcgctgacggcgatgccgcagctttcctgtccgcggtgctgcaaggcgaataatccgtaataaatggaagaagaaatgtcgtgtccgtcaaaatcataggcgccgaaaacaccgcattcctcgccgggcttgtccgtttcaaatggtgttcgatcgtagttcatagaagtcccccgttcctccgcaaaccgcggtattctgctgtttgtgttcagtttatctgccgaaaatacacaggcggcaaacgccgtgaaaacgtttcccgcttaacagaattattataatcggacttttgtgaaattgcaattctaagttttaaaaactgcaaatatgtgtagaagatgacaaaatcctttgacaaacggcgcgcaaattcgttgacacaaaaaacaaaacgcggtataatagcaagcgaaagaaacgacgagcccgaacagtccgggggactgttcagccgtaagaaaccctatcaaggggttttttaaacggcggtcagaaacggccgttagaaagagctatgacacatttttacatgtaagattaaaaatgaaaacagaaaggatctcgctatgcatatcgttattttggacggcggctctacaaaccccggcgacgtctcgtgggcgccgctcagggcgctcggcagcgtcaccgtgtatgactccactaagcccgaagaaatcgtagaacgcgcaaaggacgccgaagctgtcatcttgaaccgcaatgttataagccgcgaaatcatgcagaaattgccgaagctgcgctttatcggccttcttgcaacggggtataatactgtcgatgtcaaagccgcaggagaactgggcatcaccgtgtgtaatgtgccgctttattgcgtggagaccgtcgcgcagcaggcgtttgcgctgcttttggagctgtgcaatcacaccgaaaaaataagcgccgccacccgcggcggcgactgggataaggccagaacgatgagccacagcacgcatccgctgtttgagctgtacggcaaaacgctcggcatcgtcggcttcggacatatcgggcagaccgtctcaaagctcggcgcggcgctcggcatgaaaattctcgtatacagccgcacgaaacgggagctgcccgagcgttatcagtgggcggagctcgacgcgcttttcaaaaatgccgatgtcgtctcgctgcactgcccgctcacggacgagacccgcgggcttgtgaatgcggagcgccttaacctgatgaagcccactgcgttccttatcaatacggcgcgcggtgcagttgtggacgaagctgcccttgccgaggcgctgaatagtggccgcatcgccggagcggggcttgacgtccttgtgcacgagccgccgaaaaaggatgacccgctgctcaccgcccaaaactgtatcgtcacgccgcacatcgcgtgggcgtcccgagacgcgcgcgtccgtctcattaagactgtcgccgagaacctgaaagcgttccagaacggcacgccgcagaacgtcgtttcgtgattttaccgctcttttcgctttttacggagacttcaaaagccttctgtaaaaagtaatgcagaagagagaaaaaataatacagaaaagagcaaaaggcgagaaatgaatctcgccttttgctctcttttggggaggagttgtattgaaaagtcgcggtaacgtttaccgcagagctcgttgtcatttgttatgtctctattatagcgactgaaatatcgattgtcaacggtttctgcaacaatctcccttttgctattgtcgcacaaatcaaaataaaaatttgtgtatattttgcacatataaattgaccgcgtttttccacataagccgtttgaaatcgtatctcacccttaaaatacccgcatgttctctactttatacatgaaaaagagaattttgtgtttgacggaggtttttccatgataaagaaaaatgatttgtttgaagcggagatcaccgccatgaccgccgagggcagcggcatctgccgcgcagatggcatggccgtgttcgtgcccggtaccgccgtgggcgaccgctgcgtcgtgcgcgtcgtaaaagtcctcaaaaagtacgcattcgggcggctcgaggagctgcttacgccgtcgcccgatcgcaccacaccggattgctccattgcaggcccgtgcggcggctgcgtttaccgccacatcacgtatgaagcggagctgaagatcaaaacgcagcgtgtccgcgacgccttggagcgcatcggcggctttgaaaatatccccatggagccgatcctcggcgcgccgtcccgcacgcgctaccgcaacaaatgccagctgcccatcgggctttccaaaaacggcgaaatgcagatgggcttttacgccgtgaattcccaccgtatcatcgacacgcacacctgccttttgcagcccgaggtgtttgatcgcgcggcggaagcgttccgcgcgtggcaaaaactgagcggggagagcatctacgatgaagcggcgcacagcggcgttctgcgccacctttacatgcgctgtggcgaaaagagcggggaggtgctcgtgtgcatcgtcgcgaacggcgcaaagctgcacggggaagacttgctcgtcaaaatgctgcgcgaggctgtgccggaaattaccggcattgtgttaaacatcaaccgtgagcgtacaaatgtcgttttgggtcgcgagctgcgcacgctgtggggcaagcccacgatccgcgatacgctctgcaggctggagtttgaaatttcgccccacgcgttttatcaggtgaaccgcacgcaggcggaggcgctttacaacaaggccgcagagtacgccgggcttacaggtgcggaaacgctgcttgacctctactgcggcaccggcaccatcggactttccatggcgagccgcgcgaagaagctcatcggcgcggagattatcccctccgctgttgaaaatgcccgcaaaaacgccgcgcacaaccatgtcacgaacgccgagttcctttgcggtgacgccaaagacgccgcgcgcatcctctacgagcgcggcgagcgccccgacgtcatcgtcatcgaccctccgcgcaagggctgcgatgccgccgttatcacgaccatcgccgccatgcgccccacgcgcgtcgtctacgtctcctgcgaccccgccaccctcgcccgcgatttaaagcagtttaccgccgaggactataatattgaggccgtcacccccgtcgatatgttcccgggtaccgcgcatgtcgagacggtagtactgctttcccacaaaaagccagacggacatagagagggcttggtaataaatgaatctaatttggaagatacagataaaagcaggatgaagaaggcataagacgaagagaggctttttataaaatgaaaatagaaaattatgcagaaaacatatattctttaggtgagactgtaacgggacagacacaggctatgtcacaggccgtacggaaaacactggaaaataatggcggggtaggtataatgacaggatcttatgaccagaacctgtctattttgtctgtgaataatctgctgttgcatagtataggatatacattcgatactttcatggaacagacaaaaggctcattgaaaaacttcttttatgacaaggaatatatactggagcgagaccgttttttgcagcttcacggaacaggggaagcacagatccttgcagcagacggtacagtgaaaaatgtacggctttgtaaagaggatgcgacagatgaggcgggcagacagatctgggttatgtccgtacagttcaactgggatcatgtaaatttggcactgctcaatgaggctatctgttccggcttctggtatattgactgtgacgaaaacagtgagattgtgaatgtaaactggagtcatgaattccgaaaaatgctcggctatcatgacacgctggactttccgaataaactggaatcctggtcagatcttctgcatccacaggataaagaaagagtaatggtgcagcttcaggcggcaattaaagataagacgaaccggataaaataccaggcagattatcgtatgagaatgaaggataatcaataccagtggtttcgggcagcggcagaaggaatacgccgtctggatggttctgtcagcaggattgccgggatttttattaacattgatgcgaagaaaaaagaagtcatgcaggcacaaaaatctgctgctttccaccgggcttttacgaaagcagatctgtgcgagtattatgtgaatctggaagcgaatacttttgatacctttaaggttgaaccgtccctgatgaccgtctttgaacagagtcgtacatgggatgaactgattcggcattttgtggattcctatgttgtggagacagataagaaggcggtatcctctttttacgaccgcggttatattgcagaaaggctgaagggtctggaaaccgaattgtctttagagtgccgtatcactctgaatggagaagaacgatgggtccgcaatgtggtcatacgtggcgaaatagaggattcagaatatgccatgatctttctgcgtgatatcacagaggcaaaggcagagagcaaacggcatctgcagatggcagcggataatgcttccatggagcagctgattcagagtattgtgcgtctgtttgaccgctttgttgtctgtgatctggaaaatgacagatataaatcctacactctgaatggacagaggatatataaacctctgggattttatcatgattttcagatgcaggttcttgaaaaatataagacactggaaccattggaagctatagatatcctgatagccccggataatattcggaagaaactgaaaagtgaaaatgatatttataagtttgagtattgcagcctggatgaaaagacttataaaatcgcttcttatattcccttggaatggaagaatggaaagctggaaaaggtattgctggcatccatgaatgtgacacaggagaagaaagcagagattgaatcccgtcaggcactgaaagaggcttaccggtccgcagaaaatgcaaatcgtgcgaaaacagaattcctttccaatatgtcccatgatatccggacaccaatgaatgcgattgtgggtctgacggcaatcgcaggagcaaatgttgacaacaaggacagagtcattgaatgcctcggcaagatcacagaatcaagccgccatctgctggggctgatcaatgaagtattggatatggcacgtattgaaagtggaaaaatgacactggcacaggaagatttcaatctgtcagagctggtagataatcttattacacttatggaaccggtgcttgatgaacataaacataattttgatatacacatcaatcgtattgaacatgaggctgtctgtggtgacagcttgaggattcagcaggtatttgtgaatctgatgagtaatgcgatcaagtatacaccggatggtggaaatattactttttcgatagaggaaaaacccaatggattttcagaacttggatgctatgaatttacgattgaggataatggaatcggtatgtcaccggaattccagaaaatcatgtttgatcctttcagccgtgcagatgaccaccggacaaccagagttcagggaaccggccttggaatggcaatcagcagaaatattgtgaacctgatgaatggcactattaaagtggacagtaccttgcacaagggaactaaaatcacagtaacaatttatctggagcttcagaaaaaagaaaaagaacaggacagagatctgatgaatctaccggttctggttgtggatgatgataagacatgctgtgaaagtacaattgccacactgaaagaaatcggtattacaggtgaatgggttctttctggcaaggaagctgttgaacgttgttatgcacgtcataagctaaaaaatgattattttgctgttatcctggactggaagatgccggagatggatggtatagaaactgccagacagattcggaaaaggatcgggaaagagattaccatcattgtactgacatcctatgaattcagcaaaattgaagaagaggcaaaggcggcaggtgtagatgcttttattgcaaaaccgctgttccgttcccggctgacggctacactgcggcagtttacttcaggcagaaaagaaaatacagcgagaaatgatctggagaaactgtcagaagcagattatacaggaaaaaggattctgctggttgatgataatgagttgaacagagaaattggtgttgaaattttgcagatgacaggggcagaagtggaaacagcagaaaatggaaaaatcgcagttgaaaaagtggaagcttctccgaaaggttcgtatgatcttatttttatggatatccaaatgcctgtcatgaatggttatgaggcaactgcagcaatcaggagccttcatggtgaaaagggaaaagtgcctattgttgccatgactgccaatgcttttgcagaagatgtacagttggccaaaaatacaggcatgaatggacatatcgcgaaaccgctggatatgaataagctgaaagatgttctggaaaactgtctgtaattgcctttctggatgcatggggaaagcagctgggaaacatagagagagttttgttatgacagaaactaaatatatatatttccgaagcaaccgcagtccatggcagttttggctttcatagccgtgctgatcattttgtttcttgtcctgattgtaatggtacatacagcacattaacaaagtgactgaaagacttccgtgaatcaggtgatattcctgttcgtgattctggtaattataaacaaagccaaaacccgccgaaatatcgatcaaccattaatcattcactcggattgtgggagccagtatgttgcaaaggaatataaaaaagcaaccgaaaacatgcagcgtagctactcgaagaaagcttttccgtgggataatgcgtgcatggaatcctttcattctattctcaagcgtgaatggctcaatcgctttaaaattcgcgattacaagtaggcataccggtcgattttcgaatagctggaagctttttacaacacgaaacgaattcacagtcattgcgactttatgtcaccagatgaattcgagcgagtatataaaagagcacacgctaaggcggagctgctggtaggttgaatttgggagaaatttctcattccaacttgtactaaattttgacataggaccacttgattttgtgaaatagggctattatacttagttgtgacaaaagtcccgaagactcatttgaaaaagccccggagcaaaaacagaaggacgattccgtccgccgcttttagggggcaaggaggctctcctgtgaaaaagttgttttccatccgaaaaatgaagaaaatgatgctccttctgtttctaatccctatgttcctgctacaggcgatccaaagctcccactttctccgggtccttaacgaggagatggcgcaaaacggccgggagatcctctctctgcaccagaacgccctggatgacgacataagccgcattgccaattctatctctagctattgggccttggactacagccacagcaagctgctgtatcaccaatcggattttaacgcataccagtattcctacaacgtgctgaaggaataccgctccctcatgtccttagagccctccatcggcgccctgctgctcatctcccaggccaaccacatggtgctcggggcctacaacgacagcatgatttcctacggggaaaaggacgtgcttcaagactttgcccaaaacctgaccctctgttgggactacgcgggcctccagtcctgggagcccgtccaaattgggcagcggttttatctggccaggctgttccgcaaccagacagcgggaaccctctgttttattccactggaccaaacgcttcaaaccaatctctctcctcacgactcctctgagaatttcctttttttcgcagatggagagggggttcccctcaccctggaccctgtgggaaaggaggtaacccttcagccccaccagaaaaaggcctatttttccggaaattactttattgtgcaaagctactcccccaccagcaacatgtatcttgttttcgctgaaagttctcccgtaagccttcgcaaaatcaacgtcctttccatttccattctgggagcttccgtcttggtgcttctccttcttcccctgtttttcctcctgctgaagcgttggtacctgcacccaatggagcagatggagacagccctgcaaaaaatccgccagggccagatggacgttcgtttccaagaggatcaaaaggtggaggaactgcagcacctgagcacctccttcaatcagatgatggatcgcgtcaagcagatgaaaattgcagcctacgaaaaagaactgcagtaccggtacgcccagctccaatacctgcagctgcagatcagaccccactttttcctcaacattctcaagtccctctatggcatggcgcaggggcgaaattatgaaaaaatccaaaccgccattctgatgatctcggatcatgtgcgctacatttttcacgacaaccaggatatggtccccctgcagacagaactgcatcatgtggaaaattacattcagatgcagcactacatcacctcgcaatccattgagctccacatggagatagaacccggtcttgaaggcgtccaggttcccgctctctgcttgcagacctttgtggagaacagctgcaaatacgcgattgtcccaggccgtgggctggagatttttttagaagtgcgccacctcccctccgaggagggtggcaggctggatgccgtcatccaggacaacggtcccggtctctcgcaagagttgcttcgggaattcaatgggcaggtatcctttcaataccgggaggatcgcattggcgtgtccaatatccggcaaaggtttcaactgctctatggaggggactgcggctttgcctgccgcaatctggagcccggcaccgaatttgaacttattttccccttgcagcgcaaaggatttacaacaaccaaggaggcagaggaacatgaaaattttagtggtggatgaccagcccgacgtggttgccgggattctggacggcgtgaattggcgcgcgctccatgttgagaaagcttacagcgctctcagcgccgcagaagccaaggatcttctcctgcgggagaaaatcgacatccttctgtgcgatatcgagatgcctggagaaagcggtctaagccttgttgcatggctgcaaaagcagggccgggaaaccaagtgtattttcctcacagcccacgcggattttccctatgctcaaaaagcactgcaactgggagcggtggactatctcttacagcctgcaagctatgagaatattgaagcggctatttggagagcggcagagcaattgcaggaggaggggctttctcaggtatatgaagccttggggaaaagcgtagagcgggagacattgaattttcgacgaaacgtgctgcgggaataccttctggagatccggcgtggtcccaaaaaggtggcggaaaaggccgctgcttttgggtttctggcatcctcccgtgcctaccgctgcacgctcatcgtcgtacaggagcccggcaaaaaccaaatcgatgattttctgctctatggcattcaaaatgttttggaagaacttctgcaggcctgtacagagcaggttacagtcctctttctggagcaaaaaatatacctggccatcctggcgctggcagacaatcctccagaggggacggagcagtccattgagcaggggttagaaaccctttgccgctttggcagccgggaactgcacatgggtctttcctgttattgcagcaaggactgcgtccgctttgaagggctgccccaggaataccagcagcttcgcaggcagcatcggcaaaatgtggcctgtagctgtgggctgatcttgcctaaaaagcaaagcacctcctctctcaagccggaattccccaaatgggccggaatgctctctcagggactaggggatgctgtgcgcagcgaaatccacagctatctgaaccagctaaaccaggaggggggcctcactccggagacccttttccagtttcacgaacattttcttcctttgttcctgggcgcgatgcagcactgggaaaaggaccaggacattttcagcaaagtggactacgacgccataatgcaagcctacgcctcccttccccagatgctgcaatttgtggacttcgttacggaatatgtggaaaatagcgccagcaaggggaagtgccaagggcgctctcaaattgaacggatactctcctatatacaaaaaaacctgaccaggaatattagccgttcggaaatttccaaggcgctgtacctcaacccggaatacctttcccggctctttaagcgggaaatggggatcggcctggcggagtacctgatccaggagcgcatgcggctggcccagtcccttttgaagaatacctccttttccatcagcatcattgcctcccgtgtgggttatgtaaatttttcccattttgccaaggtatttaagcaagaatttggcgtttcgccctccgagtaccgtaaaatgtgcgatccgcaggggaaatgaccaaatattttcaagaaagcaaagtcatttttagaacaatagaaagtcacattattggcagaaactccttccaaaacattctatgataatagcgaaataaaaaaagcggtgcaaaaagcgcgaacgcgaggcaccgcaaagaaggaggaaaaccaaatgaaaagacttttgaccatgctgctttcggcagcccttctcgtttcagctttcgcaggctgcggaggagagggaaaagaatcttccgccacaagcggggaaaccgctggcggctcgtccagcaaccaggccagcacggaggaaaccgattggagcagccaagaaccctacacggtaaagcttcttatccccggtgacgccaaaacggaagacgtggaagaagtttctgctgcagctagcaagatcttggaagaaaagtacaacaccacactggaaatcatgcgggtaggcttcggcagctatcccgaccaggtgaacctgatgctctcctccggcgagaagctggacgtgctctacaacaaccgcgacatcttcgtctccgccatcaacaacggacaaatcatctccatggaggaatacctgcccgaatacggtcccgacctgctggagcagatccctgaagagagatgggccaccacctccctgaacggggaaaagtacgcggtgcccgccaacaaggaagtggctgtgagctggggcttctcctgcgtgaaggaaatggccgacgccaccggcgtggattacagcaacatcaagacagaggaagacctggtccctctgctggaggccgttaaggagatgtaccccgacgtatggccggtggtctctggcggcggtgccatgacagtgttgaataccaacgatgacctgggcggcgacatcggctccctgctggactgcaccaaccccgatgacaccaccgtcatcaactggtacgcctccgacgagtataaggaaatcgtggagcgccgctatgagtgggtgaagaagggccttatcccgccggacgcctcctcttcttcggatcaggctgccactcagatcgcagccggtagaggctttggccagttctgcaacaccaaacccggcatcgaagtggagcaccagcgctctaccacgaaggaaatgctggtctttaccctgacccccgtgtacaccactaccacccgcgtggatatcttgtggtacattgcccacaacagcaaacagcccggccgcgccatccaggtgctcaatgagctgtacatcaaccctgagctggccaatatctgcatcaatggcattgagggcaagcactatgagctcatcgacgaggagcagggcatcatcgcctatcctgagggcgtggacggcactactaccggctacacctctaacccctgggcatggcccaacgagatgatttcctatgtgtgggacggcgactcccccaccatttgggaggacaccaccgcttggaacgattccgctatcgtctcccctgccatgggctttacctgggacaatgccaatgtccttaatgaggtcacagctgttcggaacgtgaaaggcaagtatgccaatgccctagagtgcggctctattgaccccgccgaggcactgcctgccttcctggaggagctggagaccgctggtgccaacaccatcatcgaggaaaagcagaaacagctggatgagtacctagccagcaaagaatgacctcatctattaacgatttattccattgttctgcgggagaggcggagcattgtctttcgattgctccgcccctttttgcgggataaatcaaatgaaggagggtccctgatgacagaaaagaaaaacctggggaaacgcctaaagcggttcatccccctttacctgatgatgataccaggcgctgtttacctgattatcaacaactacattcccatgacgggcatcgtgattgcctttaagcagttcaactacggcaaggggatctggggaagcccttttatcggcttcaaaaactttgagttcctgtttgccaccaaggatgcctggatcatcacccgtaacaccctgctgtacaatgtggtcttcatcgttctgggcaccgcctgcgccatcgccgtggcgatccttctcaacgagatccactccagcgccgccaaaaaaatctatcagactactattctggtcccctttctaatctctatcgtggtggtcagttatctggtctatgccttccttagcacggagtccggatttttgaacaagaccatcctgcccgccctggggctggagccggtctcttggtacaccgaatccaagtactggcctttcatcctcatcttggtaaacctgtggaagggcctgggctacaactgcatcatctactacgccaccctggtgggcatcgaccggggatattacgaggccgccgtcattgacggcgcgaaccgctggcagcaggtggttcacatcaccctgcccgccctgaaaccgaccattatcacccttaccttgatggctattgggaggatcttctactctgactttggcctgttctaccaagtacccatgaattctggaccactgctggacgtgaccaataccattgacacctatgtctaccgcggcttgatgtccctgaacaacatcagcatggcctccgctgcgggcgtgtatcagtctttgattggcttccttctggtgctagccgctaatttcatcgtcaaaaagggcagcagtgaaaacgctctgttctaaagggaaagacctgctaataaaagtcaagagtaaaattcagaaaaaatgagcagttaaaaaagagtacatttctctaagccgctgagcgtttcaaaaaaacggcggctgactggcgatatatttaaaaatatcaggcttgttctaaagaatccaaaatatgcttttacagtggcgtagtagatccgctgaataagcggtttacattgggaaagacggtatccagcaaagagatcagattattcttcaaaactgtttgtaccttagaatactgcttgtactggcggtagcagtttttcagtaaaagccgggtatcttcctccgggaagtatctcggcaaagtaagccagcggttaaggccgtaatttgccggttttacggcatcctttcgatcggttttgacccgtctcaaatcgttgttcccgtagccgtgtatcaactttgcatggacgacggaaacatataatcttgcgtcgtggaaaattttcgccaccggcgtatggtaatttcctgtggcttccataaccacacgagtctcaccgtccaggcttttgagcagccttgccagcgcacttagttcactgttggtgtgacggacttcaaaaggtgagatgacgacctctccaaaagggcgcatgacggcaaccgtgcttcttcctttggaaacgtcgatgccaacagagttcatttgcattcctccaatacagatttgcctcattgccgattcaatctattgggtaacgcaaactctatggctcaacctgctcaaatcgaacgctgcaataaggggacggctgacagtctttcgaacgaatatagaagttcaaggaggaaatggtcaaccggttgctcccctttattgtagcttaggcatgagatggattaaagcccagctggatgctgggcttccaaccaatatttattgtaataggaggatagaaaccatggtagatcgaagcaaaacttttcaaatcatcgcaaatgccgtcatgatcctgcttgtgctattctgtctggttccctttgcactattgatagtttcctctattaccaaggagaccagcctggtaaaatacggatacagctttattccacgggaaattgatttggccgcgtataaatacctcttggtggactccaccgatatcatccggggctatggtatctcggcgctggtcacggtcgtgggcaccatttgcaacctgactatcaccacgctgtttgcctaccccctgtcccgcaaagacctgcccgcccgcaatgcgctggcctttttcctgttttttaccatgctgttcaacggtggcctggtgcccagctacatcatgtggacgcagaccttccacattaagaacaccttggccgccttgctattccccagtctgatgatgaacgccttttacgtcattatgatgcgcacctacttcaccaccaacatcccagacgctgtcatcgaggctgcccggattgacggcgcgggagagctgcgaatactctctcaggtggtaatgcccatgtccatccccatcattgccacgctggcccttttggcgggcctggcctattggaatgactggctcaatggtctatactatatcagcgatgaccgtttgttcagtattcaggttttgctgaaccgcatgcttttggacgtccagttcctgatgagcaacagtgatgccgcaaaatcactgcagcaaaatgaggagtttgtgctgccctccacaggtattcggatggctgtggctgttatgggtgcgttgcctattctggtggtatatcctttctttcaaaaatactttgtaaagggtattgttattggcgccgtaaaaggttaatgtttcaagtaaataactttttgagaggagtttttgacatgacgaagcaatatcgttttgcccatacggactcggtgtacacgcatcagcctgatgatcctcgggcagttgttctgcagaccgatggcttacagccagacgagagaggcatttatgacgtgacagaacggctgcaggtgcttttggacagtgttaaacagcaggacaggaggggcatcgtacttatcccagagggtgtgtacagtgttagtcagactatctatcttccccgggctgtacgcatgatcggctttgggaaaaaacgtcccaagttcgtattgaaaaaggacacttccggtttccaggaagccccccaggacgacaagggggaggctgtgtatatgttctggttcacaggtaacacaccccgggtggaaggttatatccaagacgccaatgccggcactttttacagtgctgtttccaacatcgacttccagattgaagaggggaatcccgccgccgtggtgatgcgggcccactttgcccagcacggttttgtctctcactgcgtgttcgacgttggccagggcaaggcaggtatctttgacgtgggaaacgaaatggagaatttggtctttctggggggagagtacggcatctacaccaccaaatgctctcccggctggccttttgtcctggtggaaagcgccttttccggccagcggaaatccgccatcctgtcccgggaatgcggactgactctaagccatgtggaattcaaggacgttcccgccgctgatatcgtgatggacggctactgggagaaactgttctggaaggattgcgtaatggaaaatatcgctggcccggccattcggatttctcgagagaataacagttgtactcaaatcaatctgcggaatatttggtgtcgtaacgtgccgcaactgttgcttggaaaagacagcggtaaggtgacagggggcgaacaaagcgagtatatgctccatacccttttccatggggatgacctcacgttgggccagagcgaaccggaacggaagacattggtggactgggagcctgcttctcaggaacctgagtttttccgggagatctgtgatctcccgccgcaggagacttggaaaaatgcccgagattacggagcctatggcaatggcatttccgatgataccgccgccctgcaaaaggctttggatgaatgcgatactgtctatttgccccagggaacatatttgctcagcgacaccctgcggatgcgggaggggaactccctcatcggcctgaaccccatttccacccagctggtcctcggggaaaacagccccgcttgggccaggatgggcgcccccaaggcggttctggagaccagccggggcggttggaacctggtcaatggtcttggcatcgacaccgcgtcccgtaatccccgggccgtgggctgtaagtggatggcctctgccaattcctatatgaacgatgtgaagtttgtgggcggccatggccagatcacccagcagcaggaaaacgtgcctgtttacaacgcctcccgcacagcggatgtgaacccagaccgtccctgggactcgcagtactggagtttgtggatcaccgacaatgggggcggtgcttttaaggatgtgtggacggccaatacttatgcggaagcaggttttttcgtgtcggaaacggagactcccggtgttatgtatcaggtgtctatcgaacatcacgtgcgtcacgaggtgctgctgcgtaacgtggcgaactggaaatttctttgcatgcaaactgaagaagaggtggcagagggtccctattgccagccatacgagatgacgaactgtcacgacttgctgtttgcgaacttctactctttccgagttatttgggtggacaatccctatccaagtgttgtccgcgcttggaactgcgagaatatagattttctgaattgtcacaatttcacccagatgaagtacaccattgagaatctgtatgttgatgtcaatacgggaaaaacagctgggttctggcagctgggaaggctacggattccgcatatggaaagggctaagaagttgcctgatgtaaaaggtgagattggaaaaataatttctggtcttgattgtgtggatgctttgtgtcaagctccggatggcgctatctatatttgcgactctcggctgtatcgcatctatcgttgggatcctgagacagagacaatgattttgttgacgagccagcattttcagcccctgtctttggcttgtgacagtcaaggacgactgttagttgtcaccgagtatcagccggtgaaaaattctgtggtgaacggtatagaggaactggctaccgatgaatttggcggggagtctggcggcggttgctattatcctttcttttcctacgatagaagaatccgtgtctgcgctatcgatcccaaagctcccgaagcttctttagagctgcttcccgttgtctctttagagcaggcaaaacctgatatcctgtactatccggcaaatcaatggcgggacagcggggacatgatggagtcctttgcaaaaaatgacatcgcctgttacttggcgcctgatggtaagaccgctatcgttcatacgcccgctttggccagagcctgcggtttaacccccttgtgtccggataaacccgcttatctggtagacgaatacaataagtgtatcgtgcaagtgcaggtggggaatgactttgccctttcaaaccccactgtttgggccgaacgaggtgagtatgggtttgccatgacagaggacggtgacgcatatataccggattgtttactatatatctacgtcgacggagagaaaaaagatacaatccagcttcatgaccgtcccgcatgcgtgttggaagctggcaaaaataaggaatacctctatattaccgcccgcagagatgtgtacgctttgcgcttgaaataatttgtaagactaagtttgaattgcaccccatttgttgatagtatatcatactgtctaacaaatggggtgcagttcagcagtcaataacgggcatttgtcattcatatacaagctcggtcaaaacgatttcctccgtacgattgcggatgctgttcatgctgcgcacccattccatttgatcggagaacagatcgtgcttgaaggtgccaatgcggtaaaggaaatgctttccggcttggtatgagacctaaagcggtacggattttctgcaaggtaaattgataacgctgataaaatgttgacaacataataccaatctattataataaaacgcggctttattagtatttgtgtttttcgttgtgatagggggataaaatgttaaaaaccgtcctgctccagaaaataaaaccgtaccgtcgggtaaataaaaaaggcttcacgcttatggaaatgctgattgtcgtggctatcatcgcgatactcattgcggtcgcgattccggttttcagcgcacagcttcataaggcaagggtcgcaacggactgggcgaacctgcgatcgttttacgccgacatacaaacggattatatgacaacagggaagcaaaacccgaaagtccccgtagattggcacacaagcaaagattacgactggcattcggtgacgtttttgaacggacagaaagtcaaaatgaaagcaggcctctgcgcggtgagttttaaaaaagatgagggttattcgatcgtatacgattgtaacgacagacacccagcgtgccatctcagcctgcctgcaaaataatatcttgtttagaagactttgtgcattttatgtgcaaagtttttttgtggaaaagcaaaccttaaaaacataaaccaagaaaggagtcgcaaaatacccccctgtaaccgcgtttttgttattgttctcgattccctcggcacggctttcggagctgctataaaagatgcttttttcgtagtatccgtcaagcaaaaaagagagttctgctggaggttttctactttttcctctacactggaggaaaagggggagatgcttttggaacgaccggtattcagctttttttcaaaacttattatgccgttgttttacgataaaaagtttttgcgtggccgctggtttgaggaatccagtctcggctggacatggtgctggcgaaacttgtggatgcagaagataaagggcatcaatcgcgatattccgttcccggtttctttccgcaatgaagtaagcagcgcggaaaatctgattttcgacccggatgatatgaatgattttaacgcgttcggctgctattttcagaatttcgccgccaaaatcgtcattggcaaaggcagttatatcgcgccgaatgtcggtcttgtcacggcgaaccatgtgctgaccgatttggagcagcatcagcccggcaaagatatcgtacttggcaaaaactgctggatcggtatgaattccaccgttttgcccggcgtggtgttgggtgaccacaccgttgtgggtgcgggttcggtcgtgacgaaaagctttccggagggctggcaggttattgccgggaaccctgcaaaggtgattcgcaagctcgaaaagccgacaggaaatgaaaatcaaaacacagcttacccgcatcacggaaagctggaaaacgcatccggcagagaacctccccgaagacgacctcgaaaagctccgaaaatatctcatcgccgaaattcgaaagtgagggaaaatatgaaaagcccaaaaacgctctacgtctccgatttagacggcaccttgctgcgccgcgaccaaaccgtctcgccgttcacggcggaaacgatcaacacgctgacggcgcgcggcatgctgttttcctacgccacggcgcgctcgcttgtcaccgcgaaaacggtcaccaaggggctcaacacgcactttccgctcatcatttataacggcgcgttcgtccgcgataacgtcacggaggaaattcttctcgcaaattactttgacgcttccgtgtacgcggttttagatgaactcttcaaggcgaatatctaccccatcgtgtacgcaaatgtggacggcagagaacatttttcctttatctatgaaaagtgcacgcccggcctgaaaggctttgccgatacccgcgtaaacgacccccgtacccgcgaggtgtatacgacagaagagctcacgcgcggcgatcttttctatatcacctgcatcggcgacccgcaaaaactcgcgccattttacgaaaaataccgcgaaacctaccacgtcgtctactccgaagatatttactccggcgagcagtggctcgagatcatgccgaaaaccgcctccaaagcgaacgctgtcctcgagctgaaagagaagctaaagtgcgagaagctcgtcgtcttcggcgacggcaaaaacgaccttgatatgttccacgctgcggacgaagcttacgccgttcaaaatgccgacaaagaactgaaagccgccgccaccgccgtcatcggcggcaacaacgaagacggcgtagccaaatggcttttggagcatgcatttttttaaatcccggaggaaaatatgtacatttattacccaagctgtaactttagcgcggcaagtcccgcaacggcaaaaaaagtcaaagcgtattttgaaaagcaaatgccggttgccggctgttgccgcgtcaacaaaagagagatttcccctgcggatatcgcgctttacatctgtcaggcatgccgcgaaacgctcgaagacaaagtgaaaacgcagtcgatgtgggaatatctcgatgccttaaaagatttcaactttccgaacctaaacggtcaaaaattctatgtgcaggattgctggcgcgaccgcaatcacccggagatccacgaagccgtgcgcagccttttaaagaaaatgcacgcggaagtgatagagatcgagcataaccgtgaaaaatccatattctgcggcaacctgcattacgaaacggatgatccgcgtctcaaaaactacccgaacactccactgtacaagctgcccgaagacctgcaaacctctctcatgcagcattatgccgcgcagtttgacccccaaatcccggtgctgtgctactgcaaccgctgttatgaatgccttcgcatgggcggtgcaaccgccgttcacctgctcgatatcgctttttctgaaatgtaaagacagatttgtttcctttcagacaggaaaggaaccgcaaaatcgcctatactgaatacagcgacagaggaaaggggagagcgtaaatggagtggctgcccggcaacaaggagtacgaccttgccggcaagtacaacatcgagtggtattccgcagacggcgacccggacagcaccgactacgagtccgctatctggatccccgttatcccgaaaaagtaaaatcttatcacgccataagaaaaccgccctgccgatgcgcaaaacggcagggcatctcctattttatgtcggttcccgggtaaaatcgtgccaaaatttcgtcaaccgtcatgccgccttccgcaagcgttatggcggccgcttgactcatgcccacgccgtgcccatagccgagcgtcgtaaatgtgaacgcgccgttttcatacgtcaccgtaaaactcgcgctgcgtaaaccgagcgcctcccgcacatgcacgcctgtcatttctaccccgcagaccgtaagcttttccacatatcccgtgtcaaaatattgaatatccgagaaccactttcccggcgcatcgtcaaatgaaatttccgagaaagcggctcgtatctcgtcttccgtaaacgttgccgcgctctgaaacccctgcgccaaaaggtcgctcgggcacgccacagcggtgaggtacgggtagcttttttccggccacacgttctcaaacggctgcgtgcacccggcagaaatcgcaaaataacacgcgttgatcggctcgttttcaaaataaatttctttgtcgagcaccgataagcacagcgcccgcacgcggttttgttcttcgtccgtcagccccgcatcggtcgtgtagatgctcttttccgcgctgtcacaggtaaaatcaaaatctttccccgtgttttcccgccgcttgcggtcatagagcgtgtgtatcgcgatgacttgtgcctttaacgcctcgtcgggggcagaaacagccatctcacacggcagcgccccgcagagaaaatccagatcgttcactgtgcggaccgtctctgttgccgtgtcgtaaatgcgaaaaacagattcgctttttgtcgtgccgctttccgcaaacaacagcggcgttaccgcgcaaaacagatacagcgcacccaaaaacgcgaaaaacctgcgtaccggccattttgatttcagcttcattttacacctcaagatgaaaaaacttattgtcactcatgcaatattttgtgctaaatttattttttgtagaataaatcaagataaaaatgaaagatattgagtttcataattcaaaaatgcttgacgaaatcgcaactctgcgctattatgtatctactacgcgaaaatgtgcggaacgcagtgcgaagagccgcgcaggaaaggatgagcagttttggaaagattgataaacgaaagtgcaagcagcacaacagtcagcgagctttgcgccgagtatcgtgccaataaccaaattacaaaggatgaatacgagctttaccacgtcaaacgcggcctgcgcaaccgcgacggcaccggcgtcatggccggtcttacgcacgtctgtaatgtgcacggctacctcatcagcgacggcgtgaagattccggatagcggccgcctcacataccgcagcatgaatgttgtggatatcatcaacggctgccgcgcggaaggccgtttcggctttgaagaagtcgtgtggcttttgatcttcggcaagctgcccgatgaacgccagtataaccgcatctgtcagctcctttacgaaaaccgcgagctgccggaatacttccccgaggacgtcattatgaaaaacccgtcgcgcgacgtgatgaataagctcgcgcgtgccgttttgacgctctattcctacgatgacgacccggacgatctctcactcgaaaataacatgcgccaaagcatctcgctcattgcgcgtatgccggccatcatgacgtatgcctatcaggtcaagcgccgccattacgataaacagaccatgtttttccacccgttcgagccgcagcacaaaacggcggaggcgattttgaattccctgcgcgaggatcgccaattcacgcacgaggaagcccagctgctcgacctttgcatggtgctccacgcagagcacggcggcggtaacaactccacatttaccacgcgtgtgctttcctccgcgcaaacggatatctactccaccatcgccgcagctatcggctccctgaagggcttccgtcacggcggcgcgaaccacaaggtacgccagatgatgacggacatcatgcagaatgtgcagcactgggacagcgatgacgaagtggaaaattacctcgagcgcattttgcgccgcgaggtgggggacaagagcggactcatctacggcatcggtcacgccatttacacattgtccgatccgcgtgccgtcgagctcaaaaaacaggcgcgttccctcgccgccaaaaccggctacgccgaccagttcgcgctgtatgagcgcatcgagcgcttagcgccagacgcgttccataaagttacggggaacgagaaagtagtatgcgccaacgtcgatttttattccgggctcgtctatgagatgctcggcattccggaggatctctacacgcccatgttcgccgtttcgcgcatctccggctggtgcgcccaccgcatcgaggagctcacaacgggcggccgcatcatccgcccggcgtaccgtgcgctgcccaccggtcagacctacatcccgctcaaggaccgccattacgatgcaaagtccgttttgtaaataaaacggcataaaagcccaaaacggcttgctttttgccgttattgcccgtataatcaaattcagaaagcagcaaggtgtgtgcgatggccctgtcttcgcccgcacctttccgtttgcatgattccattaaatctcgtttttctacgaaaggaagagggggtaaaatccatgaaagcacccatcacatttgccatcgccggcttcggcgaccgcggcagcacatacgcttccatgcagaagcttttcccggaccgcatgaaggtcgtcgccgtggcggatatcaacccggaaaaggtacagaaagcgaaagagctctacggcatcaaggatgagctttgcttcacgagcgcagaggaaatgctcgcgcaggataagcttgccgatgtcatggtcgtttccaccatggatcgccagcacgtcaaccacgccattccggcgcttgaaaagggctataatatcctgatggaaaagccgatctccccggatcttcaggagtgcaagcgtatcatcgaggttgcaaagcactgccccggcaagatcatcgtatgtcatgttctgcgctataccacgttctataatacattaaagtccattctcgacagcaaaaaaatcggcgatgtcgtctccgtctgtgcaaacgagaacgtcggctactggcaccaggcgcactcctttgtgcgtggcaactggcgcaacagtgaccagacaagccccatgatcctccagaagtgctgccacgatatggacatctacacctggctgctcggcaaaaaatgtaaggccatttcctccgtcggtgatacgcacctcttcaaaaaggagtgcgcaccggagggcgcaacgccgtactgcctcggcggctgcaaagcgaaggaaaactgcaagttcgacgccgagaagatctacatcacgaaccccgcaacgggcatccgcaacggcaatacgtggatggcgggcgttgcctgcggcgtgaaccccaccgaagagcgcacctatgaagcactgaaaaacggtcagtacggccgctgcgtctatatgtgcgacaacaacgtcgtcgaccaccagcagacgaacctcctcttcgaggacggcacaaccatgagtttcaccatgtgcgcgttcaccgaaaagtgctaccgttatttcaaggccatgggcacgaacggtgagatcgaagccgatatgctctcgaataaaatccacgtccgcgtcttcggcgagccggaagaaatcatcgatgtcaagctccttgcaaacgacctcaagggtcacggcggcggcgacagcggcatcgtgaacgacttcctcgatatgctcatcaacgagaccgaagccaccgagcgcaccacaacgctggagcactccctcgaaagccacttcatggcgctcgcagccgaagaatcccgtctccgcggcggcgagctcatcaacatggatgcgttcaaaaacggcaagtaatttaacaatctgaacataaaaagtcctgcacgcattataagctgtgcaggattttttactatattcaatttaatatttcatcacaaatacgcgtccacaacggcctgcgtctcatcacgctttgcttccatttccgccacaaggtggaactggttgcgtgcgcggtctaagttgtgctgcgggtacttcgtcttaaagtacacatcgccgttcaggtagtccgcaaggaagcggatgcccacctcaaacgtcatcagcttcgcgccgtccggcagcgtgcggatttccgtctcggtcagcgccttgccggcttcgccgaggaagccttccgtgtacgccttaaagagcggcacgctgaagtgcaccttcgtcagatcggtttcgtcctccgcaccggtggaagcgcccgcgcggatggaatcaccgaagtcaaacgccgcaaggcccggcatcaccgtgtcaagatcgatgacgcacaccgcgtcacccgtcgcattatcgatcaaaacgttgctcattttcgtgtcgttgtgcgtcaccttcagcggcagcttgccctcctcaagcaggttcatcaaaagcccgcagtccgtttcgcgtgcctttgcaaattccagctcggccgcaacattctttaagcgcccggctttatcctcacgtaccgcgtccatcagttgccggaagcgcgccggggtgtcgtgaaagtgcgggatgacctcgtgcagcgtctctgccgggtaatcagagagcatgttctgaaacgcaccgaacgccgcgccggattttttcagcatctccggagattccgcaaagtcatacgccgttgtgttctccaaattgatcgtcgagcgccagtagttgccctcactgtcgatataataatacttgccgtcgttcgtctttaaaaccgtcagcgtgccgcgcttcgggtctttgccggccttttcaagcttctccgccaaaaacttcgtcacgtgcaccatgttgtccatgatctcatccgggtgtgggaacacatacccgttcacgcgctgcaaaacaaagttgcccttttccgtgcgcgccagaaacgtgtcgttgatgtgcccgccgccgtacggttcaatggagcttacacagtcgccataaaaatacgcctttgcggcctcgttataaagaattccctttttgtccgccatgttttatccccttagagtaaatttaaaaccgtcaattattgatgatgatgcgcaagatttcggaaccgcccgccgcggaaagatccatcgcgccgctgtaccgctccaaaatgccgcgtaccacttccatgccgagcacctgcggctttttcggctcaaacagcttatgtacaaggtcgttcacggagctcttcgtcgccggtgtgcgctttttctgttttttctgcgccgagtacaccgcctcaaacgtgatgcggttttccaccggcagcgccgtgatgcgcacgcgtggctcctctgcgccggagtgctccgcgcagtcgatggcgtgcgtcagcatgtcgttcagaatcgcgcagaattcaatggttttcagccgcaccgtgccaagctccacattgctttccaaaacgatgccgcagtgtgccgcgtaggccgccttgcccgccagcactgcattcacatacgggttttcgctgtatcgctgtaaatacggatcgtgcaggactgtttcctctttgatgatattcagcacgccttcgcagctgccgttctgtgcctcagccgcgatctcatgcaaaacaaaatcatggtgctcctgcgcgttctttgcgtttgtcacgttgcccaccatcgcgcggaaataatccgcctccgcgccgagcagctgctcgcggtgctccgccgtgcaggcactctcctggtactttgccgcgttaaacgccgcacgcaccgtaaacgccaaaacaaggtacagcgccgctgtcagaataaggcgctgcgttacgctgttcagcccgaaaaaagtcggcaaaattccgttagcgcagaataaacagacaacaagcgccgcacaaagccccacagacagcaccgaaacgccgcgctgtgcaaaatagcgaaacgggtgtgccagcgtcatgaaagagaggaatgtcagcacaatgtacagtaagctgccgatgaccgctgaccatatgccatcgcccgcaaaaggcagcgctttcaaaagcgtggtcgtcacgggaagcaaaaaggcgtagttgcagatcatcaaaagagaaaggctcagcttctgcgccaaattgttcgtgtagaggaataccgccgcaaccagcaataagagcacattcatgccgttgccgaactgccccgtcgcgtcgttaaaggcaggggagagcagcagattcaacacaatagaaagcacaaacacgccgcccgaaacaatggcctccgccagcagccgaaagcggctgtttaaaaccgtcaataataaaagtgcattgcacagaaaaacgaccggtaaaagcattttaaaacgcctcacttttccaagtttgtgtgcgcgaacccctaaatcgcacacaatttttttcagtataccatatttggccgcttctttcaacaaattccacaaagaaatgttccgcagcacgaatttttcgacactacggaacacatttatgcattatacaattctatatctcttaaaaatcagcccatgcggcggttctgcttgccggtgacagactcaatctcaatgcaccacacacccgtcgatttcggccccgtttccacgcagccggtttcctctttcgtcaaactcggcacaaaacggtcgcaaagcagacgcagcgcacggcgtttttcatcgaaatcggttacttctgtcactttgccgcgcaccacagtggaggtatagagcgtcgtcagccccttttcgtagatcgtcgggttttccacaaacagcaggcaaacctgcggattttcgcgcagagagtcaaccttcagccccgccatcgcgctgtggaagaacagcttctcgccgtcacgcaccacgttcagtgccaccgcatacggcgtgccgtccgttgcaataagggaaagtgtgccgtaagcgcagcggtcaatgaccgcaagcgcatcctcgcgggaaatcgcgcggtcggcgcggcgcattttggtcatgtctggttttgccatatccatcaattcaaaacaactccttgtcctttgttggctttagtatagcattgcatagtgccgaaagcaaccattttcaaaaaacacgcgaattttcgacgagaaattgcaaaatttcgcataagcccttgttttattccgggttttacagtatatttaattggtatgactttcggaaaggagcgcaatggactgcacggcagtccatatctgtatatatggaaaacacagaagcaaaaagaaacatcaagctcatcgcgttcgatctggacggcaccacgctgcacggcttcgcggagctttcagagcgcaaccgccgcgccatggaaaaggcgaacgacgcaggcattctggtcgtcccggccacaggccgcgtgcgcaattttattccgccgtgcctcaccgagctgccgtttatccgctacgccatcacctcaaacggcggcgccgtgtgggatattctggaaaacaaagtgctctgcaccgatctcattcccaccgagaccgcgctcgaagtgcagaaaatttttgacgattacgagctttatgtggaatactacgtgcacgggcgcggcgttacaaagcgcggcaacccggataaagcccgcaccattttcggcttcccggaagaaaaatattacttcctcacaaaagattatacgtttacggacaacctctccgcgtatttaaaagaaacgcacgccgagccggaaaagatcaatatgatgttcatcccggaaagcgtccgcccggaaattttggcccgcctgcaaaagttaggcggcatcgagcttacattctcgaacgtcgataacatcgagatcaataaaaagggctgcgataagggcaccgcactgtattcgctctgcaaggtcctcggcatcgatcccaaaaacaccatggcggcgggcgataacggcaacgacctcggcatgctgaaagccgcaggcttcgccgccgtcgtcggcaacggcatagaggaagcgaaagcgattgccgacgccgtcgtcgcaccgtgtatcgaagacggcttcgcggaagccgtggagcggtttgcactgagataaaaagaaaatataaaagcaccatttgaaaggaaccaaactatgctgaatgtcaacggggtcgccatcaattttgatggtcagaacctcttttcaaacgtcaatctccagtttttgccgggcaactgctacggcatcatcggcgcaaacggcgcgggtaaatccaccttcctgcgtattttgtccggcgatttagagcccagtaagggcgaggtcacgtttgaccccaaatacagaatgtccgttctgaaacaggaccactttgcttacgaagaccaaaccatttttgataccatcatgcagggcaatgcaaggttgtatgagatcgcacaggaaaaagacgcgctgtacgcaaagcccgattttgacgaagaagacggcaaccgcgccgccgagcttgaagccgagttctccgagctcaacggttgggacgccgagaccgaagccgcaaagctcatgcagggtctcgggctcgacagcaacgatatgtataacaccatgagcactctgaaccagaccgaaaaggttaaagtgctcttggcccgcgcgctgttcggccagccggatatgattctccttgacgaaccgacgaacggcctcgacgccaaagccatcacatggttagaggattttctcattgagtacgagggcaccgtcatcgttgtctcccatgaccgccactttttaaataacgtctgcacccatattgtcgatgtcgattacggcaagatcaaaatgtacgtcggcaactacgacttctggtatgagtcgagccagctcatgcagcgcatgatgcgcgaccagaaccgcaaggcggaggaaaaaatcaaggagctccagaacttcatccagcgcttctccgcaaataaatcgaagtcccgtcaggcgacgtccagaaagaagctgctcgataaaatcaccgtcgaagaaatgcccgcgtcctcccgccgctacccgtatgtcggctttacgatggacagagagctcggcaaagatgtcctcaccgtctcgggccttacaaagaccgtagacggcgtaaaggtgcttgataacgtcacgtttaccgtcggccgcacggataaaatcgcgttcaccgcatcaaacgagttcgccgtgccgacgcttttcaaaatcttaatgggcgagctggagccggatgccggcacattcaagtggggcgtttcgacgagtcagtcctatttcccgcaggataattccgcctatttcaccgatacggaagattccatcatccgctggctcgagcaatattccaaagacaccaccgaaacgtatctgcgcggtttcctcggcaaaatgctgttctccggcgaagacgtctataagcctgtgcaggtgctttccggcggcgaaaaggtgcgctgcatgctttcgcgcatgatgatgttcggcagcaatgtactcctgctcgaccagcccacgaaccacctcgacctcgagtctatcactgccgtcaacaacggcctcatcgatttcaagggtgtcgtgctgttcgcatcgcacgaccacgagttcacccagaccgtcgcgaaccgcatcatcgaaattctgcccgagggcggcacgttcgaccgcgttaccacctacgacgagtacctcgaaatgcgcggctaaacccgtattgaatacggctaacccgcaaaagttgcggctgattcataatctggaaaacgttgtccggcactatgctttagtcgccggacaaacttttatcgaaaatttcaaaatccgtgtaacctgccgatataaaacgcctacttataaagtgaaggggaagggaggacaaaagcatgaaggaagaccatgagatcatcgagctctactgggcgcgcagcgaaagcgccgtgcacgaaacggacgaaaagtacggggcaaagctccacacgctctccgggcgcattctgcccgaagcagaggatgccgaggagtgcgtcaacgatacgtacctcggcgcgtggaatgccatgccgccgcagcgcccgctcgcgctctttgcgtttttggcgcgcatctgccgcaacatcgcgtgcgataagttagacaagctccgcgcgaaaaagcgcagcgcagaggtctccgcgctcacggaggagctttcggcatgtatcgcagacccaacagcagcaagggaagcggaaagccgcgagattgccgaagccttaaacagctttctctcgacgcttcccgtcgatgcccggctctttttcatgcgccgttactggtatatggattccgtaaaagccatcgccgaaaagtacggctgcggcgaaagccgcgtcaaaacgtccctccaccgcacgcgtgaaaagctgcgggattatctccaaaaggaagacatctggctttaaagaaaggcgggaacagtatgacaggtatcgatttgttcaaggccctcggcggtgtaaaggaagaatatatcgcggaagcggacggcagccgcaagctgccgcacgtaagaaaagtcaccctgcaatggtgtgccgcgctcgccgcgtgcgtgtgtctgctgctcggctggggcttcatcgcgcagcacctcaacggcatagccgattacaccggcgacgaaacgaaagtcacaggcgccgccgagatcgcgcaggcagacggcgcagatcagggtaccgcgcccgccatcggcggcaaggttgtgctccctgtgcgcatcacggcagaaacacagcccgtaagcgacgtgaaggtcttcacggacgaggaaaaaatcgggcagatcatgccgctgcttctcctaaagaacgcggcggaaacgagcgacgacccgaacgcatacgtcggctcggccaacattttcacactggaatacgcaaacggcgaaacgagtacgatcacggtttacggcaatctgttctataaaaaggacgacggcccgtggtgtgatattccgtacgaacaggccgaaaagctcgaaaagctcgtccgcagccttggggccgacgcataaaaccgtaaaatttgacaaaaaaggcaaataagactggattttcctgcggttccccgctataatagaaataatgtctttctccgcgtaatcttgcggaagaagaaaacgaaaacgctctgaaagcgtaaaaaaggggaatttgcaaatggaaattgcaattacagtcttgctgctcatcgtgggtctcgtgctcatcatcaagggcggcgatttctttgtggatgccgcatcgtggatggcggaggcttccggcattccgaagcttattgtcggcgcaacggtcgtcagcttcgcgaccactttgccggagctgctcgtctccatcttcgcggcgctcgacgcacgtgccgcagaggcactttcgcccggcagcggcatcggcatggtggatatgtccatcggcaacgccatcggcagcgtcacggcgaacctcggtctcatcatgggcatcgcgcttgtcgccattcctatggcgatccgccgcaaagattacatgctcaaaatgatcctcatgctcgtggctgccgctgtcgccgtatgtttctcactgtttgataacggcgtcggcatggttgccagcattttgctcatcatcattttcgtcattgccatgtacgacaacatccacgaggccgtcgtcgccgtcaagggcggggcaaagggtcagcagctcgatgagcccgtcacgaaaaaagccgtcatcaccaatgttgtcaagttcctcatcggcgcggtcggcacggtcgccggcgcacagctccttgtcgataacggctccgcgctcgcttccatgtgcggcgtttcggatcgcgtcatctccgtcaccatcatcgccatcggcacgtctctgccggagcttgtcaccacgctcaccgccatcgcgaaaaagcagggctcgctctccgcaggcaacatcatcggcgcaaatatcatcgatctgaccttgattctgcccgtatgcgcgctcatctacggcagcaagctccctgcgtcgcccaccgtcgccatggtcgatatcccggcatgtctcatcatcggcattctgtctgtcgtgcccacgctcatcacgaagaaattctcgcgctggcagggcgttttaatgctcgccgcctacgccgtctatatcgtgctcagcgtcattgttatggcataacttgtaacttttgtaacgaaagctccgttttcaagaaaaacggggcttttttatgcacttttcaaatcatttcctcttgacttttcagcgctctgtatgctaaaatgtaacagaagtgtaacaaatgttattgatttgtaatttttgaatgtcaggtgagaagcgcatgcaggcggcagaaatgcagataaaaaccgaaaacagtgttgaggcagcaagcaccattcttcgcacactgcgtcatgccgtgccggtgctcttggccttgcttatcgctttgctcgccgccgcacccgttttggcggatgagaccgatgaagcgataacggataccgaaaccgtctctgccgaaccgacggaagacctccgggacgattacaccgccgtcgccgcgcagctggaagccgtcgcgcgcgcagagggcagagatatggccgataaaatgctcagcactgccctgcacagcctcacggggacttcggtcgataccgatgacgccgaaagcgccgtttccgccgcggctgcgcccgaggccgcagagccgaaggctgtcgtcgtcaacgcctccgcgcaggcgggcgccaagtggtctgcaaagggcattctgccgtttttggccgttgtgctgctggcacttttaggtctttcgcttgccgtgcgccccatgcgccgccgtcgtgtgcattcggcccgtgcttattgccccatgcatgaccgcactttgaatgacactgcgtttcaaagccgcgcacattccactttataaatccgatcataaggaaaaacatacttttcctctcttttcggcgccgctcggttctcgggcggcgctctttttttcgcaaacccgcataaatcccgttttgacattcctgaaaatcccatttttaaaaatgcacacaaattcatcgtcaaactttattcatattttacgcaaaagcggttgacaaatcctgactttttccgtaaactgaacttattgcgtttgcatctaaaaccaaataaaatcggctgttccggaaaggtcgctaaagcgggcaacacacaaagcgttgtgttgcttttatcctgttcggaaaagtgttcctgccgcggccggatcgcgggcgaaagcctgcggccgtgaaaaatcctttgcggaagcagtacgcatcatgcagccggggtgtgtgattcactaagaccgcgcaactttcgggggacaagggtcccaccaaaccgcaaaggggatgctttccatgttaaaaccaatcatcacgctcaaagacattgcagtatcgtttgacggcgagcaggtcttaaagaacttcaacctcaccatcggtgacggcgagttcgtaacactgctcggaccctccggctgcggcaaaaccacggttttgcgcaccatcggcggcttcgtcacaccggatagcggcgatgtcttttttggtgacgagaaaatcaataacgtgccgccgcataagcgcgccgtcaatacaattttccaaaagtacgcgcttttcccgcacctgaacgtctatgaaaacatcgcgttcggcatgcgtctcaaaggtaagaaagaagacgaaattcaaaagaccgtcaccgaaatgctgcatatggtcaacttaaacggcatggcgcaccgcggtgtcggccagctttccggcggtcagcagcagcgtgttgccattgcgcgcgccctcgcaaacgagccgaaggtgctcctcctcgatgagccgctttccgcgctcgatttaaagctgcgcaaggatatgcagaacgaactcaaaaaaatccagcaggccatcggcatcacgttcattttcgtcacgcacgaccaggaggaagcgctctccatgagtgacacggtcgtcgtcatggataagggcgaaattcagcagatcggctcgccgattgacatctacaacgaaccgaaaaacgccttcgttgcggacttcatcggcgaaagcaatatcctcgacggcaccatgatcgaagactacctcgtcgaggtcgccggtcagcgcttcaagtcgctcgacagcggcttcggcaaaatggccccggtcgacgttgtcatccgcccggaagatatcgacatcgtacccaccggctccgccgccgcacacatcaacggcgtcgtcaccagcgtcacgtttaagggcgtacactatgagattatcgtcgatgttgacggcttcaagtggatgatccagacgactgacagcgccaacgtcggcgataagatcggccttgcgctcaccccggacgacattcacgtcatggcgaagtccgtttactccggcactatgggcgattacagcacgttcagtgacgaaatggaggaagcgctccaggaggagggcagcgaacatgaggactaaactcatctccgccccgtacacgatctggatgacgctgttcatcatcgtgcccatgggtcttgtggcattctttgcctttaccgataaaagcggcgcttttacgttagataacatcgcgcgcgtcggccagtattccaacgtcttcctgcgttctatctggctcggcgcactcgcaacgtttatttcgcttctgctcggctacccgctcgcgtatatcatcgccaaagcggcgccgaaccgccagagcttcctcattttgctcatcatgctgcctatgtggatgaacttcctgctgcgcacctacgcatggatgtccctccttgaggataacggcctcatcaacaatatgctcgccgccgtcggtctgccgcgcatccacatgatcaacaccgcgggcgcagtcgtcctcggcatggtgtataactacatcccgtacatgatcctgcccatttactctgtgctcaccaaaatcgacaacagtgtcatcgaagctgcgcaggatctcggtgcaaacaaccgcaatgtcttccttaaagttgtcctgcccatgagcatgcccggtgtcatttccggcgttaccatggtgttcgtgcccgctgtttccacatttattatctctaaaatgctcggcggcggcggaaacctgctcatcggcgacctcatcgatatgcagttcctcggctcggcgtataacccgaacctcggctctgccatttcacttgtcctcatggtcatcattctcatctgcatgggcatcatgaaccagttcgacgacggtgaaaatgtgggaggaggtatgattctgtgaaaacggcttccaaagtctacacggcgctcatcttcatctttctttacgcgcccatcatcgtgctcatcatcttctcgttcaacgatacggataccgcaagccgcacccagttttccggctttacactgcgctggtatcagcgcctgtttgaggaccgctatattctggaggcgctgctcaatacattgatcatcgccgtcgtttccgcgttcgcttccactgtactcggcaccatggcggcggtcggcatcaaccgcatgaagcgtatgccgaaaaaggtcatgatgaacatcaccaattttcccatggtcaacccggaaatcgtcaccggtgtttccatgatgcttctgttcgtcgcggcagtcagcctgttcggcggcaaaagcctcggcatggcgtcgctcatcatcgcgcacatcacgttctgcctgccgtatgtcatcctgtccgttctgccgaagctgcgccagatgaacccgaatctcttcgaggccgcgcaggatctcggctgcccgccggtacgcgcgttctttaaagtcgtgctgccggagatcatgcccggcatcgtcaccggcatgatcatggcgttcacgctctccatcgatgatttcgtcatcagctacttcacaagcggcaccacgcagacgctgcccatctacatttattccatgacgagaaagcgcatctccccggagatcaacgcgctttccaccgtgctctttgtgtgcatcatgctcttgctcatcatcatcaatgtccgccagggacgtgaagagcgccgtgccaaaaaggcagaaagggagcgtgcctgatgaaaaagaaattttttgccgtcttttttgcgcttctggtgctctgcaccgcagtcgtgcccgtctttgccgatgaagccgacgactgggatttttccgaagaataccccaccgcagagcccaccggtgtgaccatcaatgtctacaactggggcgagtatatttcaaacggcaccgagggctcgctggatgtcaatgccgagttcacccgtcgcaccggcatcgaggtcaactacaccacgttcgacagcaacgagtcgctgtactccaaactcgcaggcggcggcgcaagctacgatgtcattgtcccgtccgattacatgatctcaaagctcatgaacgagaatatgctcgcggagctggatttcagcaacattccgaatttcgagtacatcgacgagcagttccgaaaccccgattacgaccccgaaaacaaattctccgtgccgtacacatggggcaccgtcggcctgttctataataccgattatgtcaccgagcccgtcaccagctggtctattttgtgggacgagcagtatagcggcaagattttgatgttcgataacccgcgcgacgcgttcgccatcgcacaggagcgcctcggcttctccctcaattccaccgacgaaagcgagtgggagcaggcggctatgcttttaaaggagcagaagcccctcgtacaggcgtacgtcatggatcagatttttgacaaaatggaaagcggcgaagcgtggcttgcaccgtactattccggcgatgccggcacgcttgttgaaaataacgacaacatcaagttcatcgtcccggaagagggcacgaactactttgtcgatgccatgtgtattccggcaacggctgagcacaaaaaagaagccgaactgtacatcaacttcatgtgtgatcccgaaatttccggtgcgaacatggatttcgtcggctacgccaccccggagaccgccgcgaaagactatcttgctcccgacgccgtcgcaaatcccatctactacccggatcaggatgtgctcgaccgcaccgaggttttcgttaatctcccgagcgagacgagcaatctgctcgatacgctctgggcagaggtcaaaatgggcggccccggccaatccgcggttctcatcgccatcatcttagtcttcctcgcagtctacatcgccatcatcatctggaaaaaacaaaagcgcaagcgcgagatgatgtaacaactgcgtaaacagaagtatattgaaagctcttcgaaaatcacgttcggggagctttttctctgtctgggcgttttatcaaaaggcttcgcctttttaggaaatccatgcaactgggtttcctagttttggtgtaggcaaaaggtattttgtcggctgtggacgacgacttagggcgctgccctaaggacctgcaagctttttcaaaagcttgcgcaaaactttttgcgttcttagcgtcttgcaatttcctctgcacctcggtataatgtggttagattcaaaacagaaagcaaggatgaaaaaaccatgaaaattcagaatgtttcggataccacttttaaaaagtacggcaaagtcatcacggggctcgattgctccgacattatcgccgccatggcggaaacgccctgcccggaaaacgtcgtctatgtgcccggtgcagagtctctcgaaaactgcgcgtctgccaaagacatcgcctacacgctctacggcggcatgcccgtgcagatcggctactgcaacggcaacaaccataagttaaacggtctcgaatatcaccgcgatagtgaagtaaacatcgccgtcaccgacctcatcctgctcatcggctccgagcaggacatcgaaaacggcaagtacgatacgtctaaggtcgaagcgttcctcgtgcccgccggcaccgttatcgaggtttacgccaccacgctgcactatgcgccgtgcaatgcaaacgacggcggcttcaagtgcgtcgtcgcgctgccgaagggtacgaacaccgacatcgaaaagcgcgcgccgaagaccgaggaagacaaaatgcttttcgcccgcaacaagtggctgctcatgcacccggaagcggcagaagagggtcagtacgtcggccttgtcggcgaaaacatctgcgtttgatttgcgtagaacgccgtaaaaccgaacaaccggggcataccgcacggcacggtgcagtatgccccttttcgctcaaaatctatccataacaagggggagacccatgacattttatgatctgctctggtattttaccatttattcgtttttaggctggtgctcggaggtcatttttgccaccgtcaccaccggcaagttcgtcaaccgcggttttttaaacgggcctgtgtgccccatctacggctttggcatgtcgctcgtgttgctcgttttgctgccgttttcggataacatccccttgctgtttatcggcggcgcgctgctcaccagcgccatcgagctcgtcggcggttgggcgctcaaaaaattcttccacaccacgtggtgggactattccgaccagcccttcaacctcggcggctatatttgcttaaaattcagcatcctctggggtctgtgtgtcgtcgtcgtcattcgcattgttcatacagctatcgcgtcgctcgtgcactggattcccttcacgctcggcgcaattctggtcggtattttcatcgcgctgtttatcacggataccatcgtcaccgtgcttaccatccgcaagctcaacgaaaagctcaccgtcatcaacgatatgtccgcgcgtctgcgcaaagagagcgacgccatctcgaacggcctcggtcgcctgacgctccttgcagacgagaagatcaccgagcagaagcaggagttcaacgaaaaagcccgccctgtccttgaagagaagcttcaggcacagcgcgctcagctttcggagaagtacgaagaataccgtgcgtcgctggaagaccgccgtgtgaaagcacagaagtctgccgaagacctccgtgcccagtggaacagcgttacctccaagctccagcgtcacacccagcgccgtttgctgcgcgccttcccgaccatgaaaaacgaccgcgcagacgaagcactgcgccgcttgcgtgcgtggatggatgaaaagaaggaaaactgatgcgtcgctatgtggaaaacgttccgccctcgctcacgcaaaaggagctgcatgaccgtgcttacgcgcttttataccgcgtcttaaaggacgagtggggcatcgcatcgcctgttgtggaaaaaactccgctcggcaaaccgtatttaaaaggggagaacatgccccatatcagcctgagccacactaagggcatcgtctgctgcgccgtgtcgcggaaaaatgtcggcatcgatgctgaatatccccgccgcgtgcgggggagtgccgcagagcgcgtctgtacgcccgcagagcttcgggacatacaaagcagcctcaatcccgccgcgcgctttttgacgtactggacgctcaaagagagcatctccaagtgccgcggcaccggcctttcggaatcgttccaaaactacgaaatcacctttcaaaacggcatgccgcatcttaacggctacacgctttttttcgagcagtacggcgtgcattttctcgccgccgccgaggaagcataaagcatagccgccccgcatacctatgaccgaaaagaaagtcttacccggttttctgcggtgaaaggtggcagcaatatgattgtatcgctcggcgcgaacaaaaaacgaattttggcggtgcttgtgctcatcgccatagccgtcagcgcgtttttcctcatcccgcgcggcgaaaagcggcagacattccccggtatgacgggggaggagcgcctcgcgtttttaacgtccttcggctgggaggcagaagcggagccgcaggatgtgcgcgaggtcgtcattcccgcaaaatttaacgatgtctatgcggcgtataatacgatgcagcaagcgcagggcttcgaccttttgccctatgccggcgaaaagtgtacgcagtaccgctaccgcatcacaaactacccgaatacgcccgatggcgtcttcgcaacgctcctcgtctttgagggcaatatcatcggcggcgatgttgcgtccggcgcagaggatggcttcatgcacggctttgcggcagacagcgcccgctatgagatgccgaagtcggtcatcaaagagagcgcgtcgcccgcgccggacaccggcgaatccacacaaaatccaacggaaagtgaaacaacatgagactcgataaattcctttcaaacgaaaatatcggcagccgcaaggcggtcggcacgctggtgcgcagcggtgccgtcgccgtcaacggacaagccgtgcgcaaaagcgatatccagatcgaccccgaaaaggacgagatcaccgtcaacggaaagcccgtgcggtacagcgcgtttgtgtacatcatgctctataagccctcgggcgtgctcaccgccacgcgtgacagccgcgcagagaccgtcttagacctcctgccgccggagcttaagcgccgcgatctgttccccgcaggccgtctcgataaggacaccaccggccttctcgttttaacgaacgacggcgagtacgcccaccgcatgttggcgccgaaaagccacgtctggaagcgttaccgcgccacgctcgacctgcccgcagaagaaaacgacatcgcgcgctttgccgccggcatcaaaagcggcgaaaatgagttcgcccctgccgtgctcgaaatcagtaaggacgatccccacatcgcgtggacggaaattcgggagggaaagttccatcaggtcaagcgtatgttttcagcgtgcggcaagaccgtcacggcccttcaccgcgaatccatcggcgctttaacgctcgatcctacacttacgcccggcgaagcgaaaattctcgatccgagcgccgctgcgttggtttttgaaaaacctgcacaaataatctgaacaaaaagcatcaagaatttttgccgtttatttattttaactaaactcaaaggaaaaagtttgggcaaataaggactgttcagggacccgattttctgctatacttagtgcattgaaaagagacgttgttcgtcacatatggctgccaggctctgacgtataacaacccatcatcaggaggaaaaatcttatggcaagtgtaacacttaaaaatgtctataaaatctattccggcggcgttaccgctgttacagatttctgcttggacatcgaagacaaggagttcatcattctcgttggtccttccggctgcggtaagtccaccacgcttagaatgatcgcaggcctcgaagagatcagcaagggtgagctttacatcggcgaccagctcgcaaacgatgttgctcctaaggacagagatatcgcaatggtgttccagaactacgctctgtacccgcacatgaccgtttatgacaacatggcattcggtctgaagctcagaaagaccccgaaggatgagatcaagcgccgcgttgaagaggctgctcgtatcctcgacatctcccacctgctcgacagaaagccgaaggctctttccggtggtcagagacagcgtgttgctctcggccgtgctatcgtccgtgacccgaaggtcttcctgctcgacgagccgctctccaacttggacgctaagctccgtgcacagatgagaaccgaaatcgctaagcttcataagagactcggcaccacctttatttacgttacacatgaccagaccgaggctatgaccatgggtgatagaatcgttgttatgaaggacggcttcatccagcaggtcgataccccgcagaacctgtatgatctgccggtcaacgaattcgttgcaggcttcatgggctccccgcagatgaactttatcgatgctactctcgttaaggaaggcgcagattactacgtcaccttcggcgcagctaagattaaggttccggcaaacaaggctaacgctgaaattgctaactatgttggcaaagagatcgtcttcggcatccgtccggaagacgtacacgatgagccggagttcatcgagaagcacccggaggccagagctacggctgacgttgaagttaccgagctgatgggcgcagagacctatctgtacctcaactgcgaaggcaatgctcttaccgctcgtgttgagccgtcttccaccgctaagaccggtgacaagatcacaatcgctctcgacatgaacaagatgcacctcttcgacaaagaaaccgagaagaccatcctcaactaatcggttttataaacagcatacagacggcgttcccaatcgggagcgccgtttttgcgtatcacacgtgccggtattcttcctcacaagctttcggcacaggtcgcgcagcttcacaccgaatctgtctgcgctacgcctggcatttcactatctttaaaaagcatttgcatcgtgcgaaaactgtggtatactgaaatcagaacattcagaacataagggagtgcttttacatgtttgtaacagaagatattcgctatatcggcgtaaacgaccatgacgtagacctttttgagggacagtacaccgtagaaaacggcatgtcctataattcctatgtcatcctcgatgaaaaagttgccgtcatggatacggtagacgcccacttcggcgtggaatggctgcaaaacctcgaaacggagcttaacggccgtcgcccggattacctcgttgtgcagcacatggagccggaccattccgccaatatcgctgtctttatggagacatacccggaggcgcagatcgtctcttctgccaaggcgttcgtcatgatgcagcagttcttcggcacggatttcccggagcgcaaggttgtcgtcggcgagggcagtacgctcaagctcggtcgtcatactttgacgtttgtcaccgcgcccatggtgcactggccggaggttatcgtcacatacgacagtacagataaagtcctcttttccgcagacggcttcggcaagttcggtgcgcttgacgtggaggaagattgggcagacgaagcccgccgttactacatcggcatcgtcggcaagtacggcgcacaggtgcaggcgctccttaaaaaagccgccgcgctcgacatcgccatcatttgcccgctgcacggcccggttttaaacgaaaacctcggctattatcttgataaatacaacacatggtcgtcctacgcggtcgaggacgagggcgttgtcatcgcctacacctccgtctacggccatacgaaagaagctgtggaggagcttgccgaaaagctgaaccagcgcggctgcccgaacgtcgttgtcgcagaccttgcccgctgcgatatggcggaagccgttgccgatgcgttccgttacagcaagctcgtgctcgccacaacgacctataatgcgacgattttcccgcacatgcagagctttatcgaccatctcaccgctcgcaattatcagggccgcaccgtcggcatgattgaaaacggcgcgtgggcgcctatggcggcaaaggtcatgaaaaagatgctggaaacgagcaagaacctcacctacacggataccaccgtcaccgtaaagtgcgccttgaacgatgcctcccgcgcccagattgacgccctcgcagatgagttgtgcaagtaaactgaaattgaagctttaagcaacatcccggtcgtaaaatttcggccgggatttttgtgcaaaaagatgtcctgtgatggcctctcatgtccttgctttttgcgaaaaaatgtgttatactggctaaaagaaacaatagttcgattaaaacggtgtgcgtgagcgtgcacaaaaccgcgttttgcgtgcagtgaacgaacaggcctccgttttttaagggggatactatgcccaaaaatccgattgtatttacgctcaatggccgtcgctgcacctgccttttgccggagggaaagcccaagcggctctatgtactgtgcgggtgggagatggaaaagctgatgatgctactcgccgaagatgcgccggaggtattatttttttctacggaaatcgacggcggccgggatttcaccccatgggaagcggagcccatttggcccggtgagccgttttcgggcggcggggaagactacttaaaattcctgacagacacggcgctgccgtatttagaggagcgtttcggcgcgccgacggaacccgaaaactgtgcgctgctggggtactcgctcggcggattatttgcgctttgggcgctgacgaaaacggaaaaattcggtgcaggtgcaagcctttccggctctttgtggtacccgcagcttttgaaatatttggagaactgtccgcctaaaaaggacaccgcaatatacttatcccttggcgaccgcgaaccgctcggcggcccgcccgtcatgcggacggtgggcgactgcacggaaatggcgaaggaaattttaagcaatcacggctgcaaggtattcttcgagtggaatcaaggcgggcacggcaagggcatcaccaaacgctggcagcgcgccgtgcgcagacttttgaccatgatggcaaaaacggtggaaaagtaagacagaatgcgggtgttttgagccttatacatgaagaatacgacgctttcctgcggttttgacgcgcttatcatcgcggggaaagaaaaagcacacgattcgtccattgtggacggcgtggtgctggacgtgttcgtatatccggcggaaacgttttcaacggactatgacccggaggagtttgtgcaggtttgggacgggaaaatcgtactggacgagcacggcattgccgggcagttaaaagcgaaagtccttgactacatcgagcatcttccgaagaaaacggtgacggaggtcgcgcaggaagtggaatggcccaaaaagacgctgcggcttatggaaaaaagcgatgcagaggcgttcgggttatatgcaaaagccctgcgggaatttgacagggaaagcttatctgcatggatcgattacttaaaaagcatggtgaatatacggccggacgggacattgacgcgataaaaaccgtggactgtgcgtgaaagcggggcactttcggagaggctgttttggcggaaagcggattgaatgtaatttgcgcaggtttgcgtgataaaaagtcagggcttatgcaggttttgcagacggaaggagacgcgaaatggaacagcagagcttatttggaaaccgggcggggcaggacatgccgcttgcgacgcggatgcggccgcggacgctggaggaatttgcggggcagcgccatttgctcggcaagggcaaggtactgcggcagctgattgaagaagaccgcgtgtcttccatgattttctgggggccgccgggcgtgggtaaaacgacgctggcgcagatcattgcggcgcggacgaaggcgaatttcatcaatttcagtgccgtgacgagcggcatcaaggaaattcgcggcgtgatgagcgaggcggagcagaaccatcgtatgggtgagcgcacactgctgtttatcgacgaaatccaccgctttaataaggcgcagcaggacgcgtttttgccgtttgtggaaaagggcagcatcgtgcttatcggtgcgacgacagagaacccctcgtttgaggtgaacgccgcacttttgtcgcgctgcaaggtgttcgttttgcaggcactttccgaggatgaacttgtggagctgatgaagcgcgcaatcaaagacccgcgcggcttcggtaaccagacggtggaaatcaccgatgagatgttgaaaatgcttgcagcgtttgcaaacggtgacgcgcgaacggcgctgggaacgctggagatggtcgttttgaacgggcaccgcgagggcgacaagacgaccgtgacgatggagacgctggagcagtgcatcagccgcaagtcgcttttgtacgacaaaaccggcgaggaacactacaacatcatctcggcgctgcacaaatcgatgcgcaacagcgacccggacgcggcggtctactggctttcgcgtatgctggaggcgggcgaagacccgctgtatgtggcgcggcggctcattcggttcgcgagcgaggacgtgggcatggcggacagccgcgcactggagatcgccgtggcggcgtatcaggcaagccattttatcggtatgccggagtgctcggtgaatttgacgcacgccgtggtgtatttgtcgatggcgccgaaatcaaacgcgctgtatgtggcgtatgagagcgcgaaaaaagacgcacagaaaatgctctccgagccggtgccgctcgtcatccgcaacgcgccaacaaagcttatgaaggagctgcattacggtgaggggtacgaatatgcgcacgatacggcggaaaagctgaccgcgatgcagtgcttgccggattcgcttgccgggaagaagtattacagaccgacggaacagggcagcgaagcaagggtgaaggagcgactgcggcagattgaagcgtggaaggcggagcggaggaaaaagtgaggttgcgttgagcaaaacttttgacaacgattgacgagagagcgtgaaaattcgggggcgttttatgttggcggttaagttttacgtagatgtgaaagacgagctgctgcgttttgcagttgttattgcgaagcatgacgggaaatgggtgttttgtaagcacaaggagcgcgagacgctggagtttccgggcgggcacagagagacgggagaggcgattgcagagacggcggagcgcgagcttatggaagaaacgggtgcggtgaaatttgagattcgtccgatctgcgtgtactccgtgacgggcaaaacgcgcgtgaacgagacgggtgaagaatcgttcggcgggctgttttatgcggaaatcgcatcgtttggggagatacacagcgagatggagaaaattgtattatgcgacgctctgccggaaaaccagacgtacccggaaattcagccggcgcttttgaaagaggcgaaaagacgggggttcggagcataaatcggcataaagaaagcacgcagagcatgaaaatctgcgtgctttttgtgtgtattgtattgacttgaagcgccggggcgtcttcagtttttcggtttgtttttttcaaagaggatggagagccctttgaggagcaggtcgtcatctaagatgatcttgttgcggcaaaggggcgcaatgacggaggagagtccgccggttgcgacgaccgtgcagggggtgtttaattccgcgttgatgcggtcgatgaggccgtccagtgcgccggcgttgccgtagagcaggccgcttttgaggcaatctacggaatttgtgccgatggtatgtttcggcagctcgaacgcgaccttcggcagctgcgcggtgcggcttgcgagggcatcgtgcgagacggccacacccggcagaatcatgccgccgcggtatccgccctccgcatccagaacggagacggtggtggcggtacccatatcgatgatgatctgcgggaggggatagtggtggatgcccgcgacggcgtccacgacgagatcgctgccgagctgggcgggattatcgatgtggatgcgcaggccggttttgatgccggggccgacgacgagcggcgtgagatgcaggtatttgtgcaccgcgtcgcgcatggtgagcgtgacggccgggacgacggacgagagaatcgcgccgtcaaccgcggtgatgtctgcgcggttcatatcaaacgccattttgagcatggcagcatattcgagcaccgttgcggtggggtttgtggagacgcgttcgcggaaaatgacctgtccatcggcacagcagccgatgacaatgttggtgttgccgatatcgatggctaagatcatgggaggacctccttttaatctgcttttttagcgggtgtttgaataaacccggcttttaagaggacgctgccgacggcgccggtgatgacggtggacgagagcatctcgaacacggcattgacgccgacgaacgcgcagacgaacagcagaatgttttggccgttgatcaagccctgcatgtactcggtctgcccgaaaagcaggatgagtgcggacatgaaaaaaagcgtatttaagaacgcagcggcgaagcccgtgacgaagcacgcggcgacgcggttcagcttactgacgctgcggaagatgtagccgagcaaaaagccgtccagcatacgcgggacaaagcacagcaaaatggagaaaaacgggttgatgctaaaaagcgtggacccgagcatgctcacaccgccgacgccaatcgcctgcagaaagcttgtgaggccgaagacggatcctgcgatgagaccacctacaggtccgagggccagtgcggacacggcaaccgggataacgttgaacgtgatggcgagcggcccgatgttcagatagccgagcggcgtaaaggacatcagcagcaaaagcgccgtcatcaggccgagcagagtgagctgctttgcgttaaatttcttgttcatattcaattttcctttcttgttattattctccgtaggagatacaatacaatacgaaaaaagtatagcacagattttgaaaaatcgcaatgttttctattgactttgacgcggcgtaaagtgataaactgggcttagcccgagaggaggacgaaagatgaaaagtgagcccaatctcgccacctcaagcagggacgagaaattctgtattgcgatactaaaaagctgtgctataatgaaattaagaaattcagttgtattgaaaagcttgattttggaggtgcacagtggaaaataaggatattttaaacgctttgcagaattatgaaatgacattcggaacgtcagaaaacatatttaacggcggacttttgacagatgcagagcgcgattttgtgatgcgggatagcaacgcatttttgttcgggctgattgcggatcagtcggtgaaagcggagaccgcatggtcactgccgtataaattggcgcagcggttagggcatttttccatgcagaagattgccaaagaaagctcgtcggaagaaataggcacactgctacgcacaaagccggcattgcatcgctatcctggcaatatggggcggtatttgtggtcggcagccgaaagacttacatcggaatacgacggctgcgccgagaatatctggggcaatgtgactgccatggagatcgtagagcggttggaggcgttctctggaatcagccacaaaaaggcttcacttgcttgtttgctgctttggcgcgatttgggtgtcgaaatatcagataaagaaaatatagatattgcgtatgatgtgcatattcggcgtatttttctgcgcgccgggttctgcgaaaaagatacattgaaagacgtaacggaagcggcgcggcggctgaaccctaagtttccgggttatttaacttcgccgttctgggccttaggccgaaatatctgccggccgacggagccattgtgcggacaatgtccgatacgacccttttgcgcacggcgtttggataaaactgaaaatctccgtgcttgaattttgcacagtcaggaaagcgggagaatcagcaaatcgatttgctgattccggtgaaagtgaaggcgtaaaagagaacataaaataaaaaattacggtgcttgcgggtaccgtagcttttcttatatacagggtttacagcgttttaatgcagcgcttttttggggcagaccttggtgcatgcatagcacaggatgcactccgtggcgtttttgcgctttcggctttctttgttgacctcgacgttcatcgggcagaccttcaggcatttgccgcattggacacatttgctttcatcgcaatgtacgcgcaggagtgaaaaatagctcatcggctttaagaagaccgtgatcgggcaaagatatttgcagaacgcgcggttatccttaaaaacaaacgcgagcgcgatgccgccggcatagtaaagaatgttgccgatgaggaacagccagaacatgatgcgctcgaggttcgaaaacttcatcaggaacagggcggagacgagcgcgaacgagagcgcgaacatcacatagcgcagcgtgcccagcttttctttgcggggcttttgcggcactttgaacgggagcaagtctaagaccatggctgtccaacaggcataaccgcaccagccgcggccgaaaagcagcgggccgaaaatttttgcgacggcgtagtgaatcgtcgccgcctcgaacacgccggaaaacagatagtaccaaaagccttcaatctgcatgttctcctgcgacatcagccccagatacacgagcatgtaaagaccgactgcgagctgcacgaactgccgcgcatagcgttttcccgcggtgaaaagcgctaagccgaccgaaaggcaagaacctatgtagctgaaattgaataaataaaacaggttgctttttgtgagccacagcgtaaccgctacgccttcaaaaagcagaaacatcaaaatcgatgcccgatactttttcaagatgagcctccttgtaactgtgctttacacatgttgtgcgtttgaaaatttaattttacgctttcattctaccatatcccgtataaaacacaagggaaatctatcgcataacgggaaaggcattttatgaaagaagcgggtctttgtgcggggtagggcgggaatgggggaaatgagcaaagatggggcggaaaaacggcttattctgtacacttttccgccttaaaaaacattgacatttggtaccaaaatcgctataataaagaacattagtgtacgcatttacccgtttttcggaattacaaataaaggtggtttatttactatggcagaaaaggcatattatgttacagaggaaggccttgcggcattgcaggctgaactggaggatttgaaggtcaaccgcagaaaagaagttgcggaaaaaattaaagaagcgctttctttcggcgatctttccgagaacagcgaatatgacgaagcaaagaacgatcaggctatccttgaggcgcgcatcgccgaccttgaagtgatggtgagcaacgcacgcgtcattgagaaggaaaaccttgcggcagataccgtgcacatcggttcttccgtatttgtaaaaacgaagcgtacggacggcagtgaagccgagcgcagcttcagcattgtgggctctaacgaagcaaacccgcgccagggcaagatctccgatgaatccgccgtgggcaaagcacttgtcggcgcgaaggtcggacagaccgttgaagtggagacacccgcaggcatcgtggagtacacgatcatctccgtatcttaattgagaatcaggcggtgcggatggaaaatccgcccgctttttttgtgaccgccgtgcggcggggaaaggaaggcagaaaatggcagaaaagaagaccccggaaacggaagcggaactgaccgaagtgctgcgcgtgcgcagagagaagctcgctcagcttgtagaagacggcaaagacccgtttcagatcacgaaatttgatgtgacgcaccacagcgcggaaattaaagacgattttgacgcgcttgagggcaaagaagttgtggtggccggccgtatgatgagcaagcgcgtcatgggcaaggcatcgttctgcaatgtgcaggacttaaagggcggcatccagtgctatgtggcgcgtgacgccgtgggcgaagacagctacaaggattttaagaaatttgacatcggcgacatcatcggcgtgcgcggcgaggtgttcaagacaaaaaccggcgagatttccattcacgcttcggctgtgacgctgctctcgaagagcctgcaggtgctgccggagaagttccacggcctgacgaacaccgatatgcgctaccgccagagatacgtcgatctcatcgtgaacccggaagtgaaggacacgtttgtaaagcgctcgaagatcattaaggagatccgcaatttcctcgacggcagaggatttatggaagtggagaccccgatgctggtttcgaatgccggcggtgcggcggcacgcccgtttgagacgcattataacgcgctgaacgaagacgtgaagctgcgtatttccctggagctttacctgaagcgcctcatcgtaggcggccttgaaaaggtttacgagattggccgtgtgttccgcaacgagggcgtcgatacgcgccacaacccggagttcacgctgatggagctttaccaggcctacacggattattacggcatgatggagctgacggaaaacatgttccgttaccttgccgagaaggtgtgcggcagcgcggtcatcacgtataacggtgtggaaatcgacctctcgaagccgtttgcgcgcttgacgatgaacgacgccatcaagaagtatgcgggtatcgactttgacgaggtgaagaccgacaaagaagcgaaggcgcttgcaaaagagcaccacattgaatatgaagagcgccacacgaagggtgacatcatcaacctgttctttgaggaatactgcgagaaagagctcattcagccgacgttcatcatggaccacccgctggcgatttctccgctgacgaagaagaagccgagcgacccgacgaaggtggagcgctttgagctgttcatcaacacgtgggaaatgtgcaatgcgtactccgagctgaacgacccgatcgaccagagagagcgttttgcggcgcaggacgcggcgtttgctgcgggcgacgaggaagcgaaccacacggacgaagatttcctgaatgcgcttgagtacggcatgcccccgacgggcggcatcggctacggcatcgaccgccttgtgatgctgctgacggattccccggccatccgcgatgttttgctgttcccgacaatgaagtcattagatggtgtaaataagaaaaatgatgtaaataatacagcttctgaagcacctgaaaaaaatgtaaaaactgagtctgaaaagattgatttttctaaggtaaaggtagagcctttatttgaggaatttgttgattttgatacattcagcaagtcagatttccgtgcagtaaaggttaaagagtgtgttgcagtaccgaagtcaaagaaactgttacagtttacgcttgatgacggaacaggcacagacagaaccattttaagcggtattcatagcttttatgagccggaagaactggttggaaagactcttattgctatcacaaatcttccaccgagagctatgatgggcattgactcttgcggtatgctcctcagtgctattcatgaagaagaaggcgaagaaaagctccatctgctgatggtcgatcctcacattccggcaggcgcaaagctctattgattgccccaaaattgtcggtgcttacgccacaacttacgccaatttactccgagcttacgccaaaaatgcgtttgaaattctgcgattgcagacaagttccgatagcatacgataagttcatatgatttaagcccgctgatttcggtcagcgggttttttctatttctgcccctattacatctccgtgatgtgataggggctttctttgtccctgaaaggtggtcgaaaaaattttttgaaaattctctttgttatttccgaaaaaagttcccagttggttagtgagggcaaaaacctcacgaaccttgaaaacagaataattgctctgtgcgcgttgaagacgaatatcacacagaacatgggcaggccgcattgcgccgagactttaattttgattctcctgtgacacagtaagaagtgacaagactttataagtaaacaccgaatcgcacagcgcaggcattttggcctgatgctgtgcgatttctttttcacctcacgaaatgctggcctgcacagccgtttgctatgcagcgcgtctcatcctttgggatgatttacatttcagaacagccgcgtataatataatttgagataggtggcaaaaggcttatgacaatctcgcactgtatcaaagggagggaagacatgaccgaaaatatcatcataaagtcctccgttcagaaacggtttgacagcttcatagcgcatggcagagtcctttttttcagcgcgccctgcggctttggaaagaccgtgctggcggacgcgctgctgcgcgggcggaatgtgctgcggcaaagcgcggcagacccagactgcgcgatcccaccgtcagcgcaggattgggacattctgctgattgacgatcttcagctcatgcaggaggaagccgggcagcaggctctttgcgaattgattcgctcaagtccggagcgccatttcgtgctgctctcgcgcggtgtgccgcccggctgcctgacggcgtttcagtacacggggctgatgacggtgctggaggccgacgacctgctttttgacgcggacgatgtgcggcggctgtttcggctttcgggagcaaatgtaacagatagcgagatcgacggaattttgaaagaatccgtgggctatccgctgggtgtggccatcacggcgcggtgcatgtccccggacaagccgtggacaccggagctggtggcgcgggtgttccacgaggtgttcctctactttgagaccgccatctaccggcgctttgacctgccggtgcggcgcttcctgttggagctggctccctttgaaagctttgacctggaaatggcgcggatggtcagcggcgatccccgtgccggcgaacggctggactggcttcttcgatacaccactatgctgcgctacgacgactgccagcgcttccacttctggtcgggtttccgagcttttctcctctgggagatggaacgggagtataccgaggaaaagcgccgcgcgctactcagccgcggcgggctttactatgagttaaaggaggacttctccagcgcgctggactgctataccaggggcggcgaccatgccaaggtctccgagctgctggtgcgcaatgcagaactccaccccggcatgggtcactatgccgagatggaaaaatactaccgcagcctgccggaggcggaaattctcgcctctccctcgctgatgcagggcatgagcatgctctgcgcgctggcgatggactacgaaggctcggagcgctggtacggcgagctgcaagcatttgccgagcgctgcggcaggcaggacgccgccggaaagcaggcccgcagccgccttgcatggctggacatttctctcccccagcggggcgtgaacggtctgacggaaaccattcccgctgtgttccggctgctgatgaacaaggaagtgacgctgccgtccttctccgtcacaagcgcgctgcccagcatcatgaacggcggcaaggacttttccgcatggagcaaaaaggacgacctgctctacaaaaccctccgtctccccgtggaggcggtgctggggcgggacggcgtgggtcttgcggactgcgccatcgccgagagcaagtttgaaaagggggaggacgtggctggtcggatgctgtcccttctcccacagctgaacgaggtccgcaaccgcggcacgccggacatggagttcgccgtcagtggactgctggcccgcagccagctggcaagcggacagcccgccgacgcgcggcgcaccatcgaggtgctccgtgaatactttgccgagcgcggtttgacacgctttctgcccaatatggacgccatgctctgccgtattgacatgcacaccggcgaccttgacgcggcggacgcgtggtatcgggaaaaagccccgcgggagctgacgcacctgaacgtcatgcggcgctaccagtatctcacccaggccatggtggagctggaggacggcaggccggacacggtgcagctgacgcttgccccgctggagccgtatgtccaaaactgcgcccgcatcatcgacggcattcacttgaatgtcctgactgccattgccctgtaccgcaagaaggacgagcggtggcgcgagcgattgacggcggcgctggatgcggcgacggagtaccgcttcatccgcaccgtcagcgtatacggcacggcagtgttgccgctgctggaggcactggactgggatggcgacaaaaagtggtataagcagataatggcggcggtacggaagcaggcggcattctacccgcattttctcgaaccccgccttgcccccggtgaggagttgacgcccacggagctgcaaattctgcatctgctctgcgcggacaagtccaacgccgagatcgcgcagatcatggatgtgaagctgccgaccgtgaagacccacgtcagccacatcctcgacaagctgaacgtgaagcgccgggcggaggccaagaccgtcgcgaaaaagctgcggctcattccggatgacctataaaagctgtgcctgtgcttgaacgggctgaatataaaccctatacgcatatcctaaaggaggatcttatgaaaaaacgagtattgagcttatttatggtgctcgtgctttgcctgacgcttctgcccacagcggctttcgccgagggagaggacgtgagcatatcgggcggtgtcatcggcggcggtgagaccggcggtgagaccggcggtgagaccggcggtgagaccggtggcgagggcggtgggatctatgtagcccccggaagcccgacagaagggggcggcggcacatatatccccggagaggacacgcggacggagatttggtgcacaatgaaaccctctttaattcagcgcaactatgacggcacgacggacggcggcacgattccaatcgacttgacgtttacagacggcacaaatgaaatcaaactcaaagaaggaacgggctttaccgccaagaagacgttcgattccgcggacgcgggacagcataccgtcactgtggaaatcgagctgatcggtgatgcggcggcaaagtacaggctcaaggcgggcgaagaaacgtttacgatcggcggctacatcgacaaggcctatcccgatctgaccgtatctctttccaaggcagcttgcacggcgggcgaaaagattctgccgctgctgtctgtcgagggtgctccggaagacgccgaggtgacatattactatgcgccgatcaattctggatatttggagtttgaaggcagtgaggcagttcccaagattgacgaaaacaccgcaatcagcgagcccggcacatattacgtttatgccaagaccggcgaaaccacgaactacaaagaggaacggtcaacaactgcggaactcatagtcaacgaggctgtcgttgaggccgcttcgataacaaaagcggacggaacggacggcggcacatacgaatccctcccggcggcactgaacgcggcgcaggacggcgacaccgtcaagctgctggcagaccatgtgacggatgcagacgccctcaatgcgctcggtgaagattttacgttcgaacagtatgcttccatcgtacccgttgtcaccaaaaccctgacgctcgatctgaaccacaagacggtcgactacctcgaggttggattctcagagactaacgaggaaacgcagaaaaaagaaactctcgcgacaggcaacctgactgttacaggcgagggcgcttacggcagaatttcaaatctcatgttcatggccggcgcactggacatccggagcggcgagatcggcggttcagaaggcgcgggacttgtctgcgacgtgaacagcggcactgcgaccatcagcaacggcacggtgtatggcctcaccgtattggagggtgcttccgtcaccgtcaagaacggtttcaatcacaggggtcgatggtctgtcgattccggcggcacgctgagtattacgggcggtacctttaaagacgtgcagtttgttaacagcggaaccatcgccatcagcggcggcacattcgagaagatttcgaacaacgacacaaacacgcctcagccgcttatgttgctgctggcgaaggattgcgctttcgttaacgagaacaacaccagcgacgtgcaggacggcacaaaaacatccttgaccgaggtaatggtcaaagagcacacgcacagctttgaaaacggcaagtgcggctgcggcgtggcagcaatcgtcgttgacaataacaacagtttctacaacacgttacaggccgctttgggtgcagcggcggatgacgcttctatcacgtcggtaacgctgggacaggatttgaccgaggatatcacgttcagcgggtcggcggctgggtcgctcacgctgaacatgaacggtcacaaactggaaacagaagcaggcgttcccctgaccgtcaccggcggcacactgcgcatcgagggcgcgggcgagatcaaccagaacaccgcttccaacgcgaccgccttccctgccatcacgctcaccggcggcaagctggtgattgtgggcgacctcaccgcgcagggcggctacgacagcagcagcggccgcaagcccgcgatctatgccacggacggcgagctggatttgcagggcaacgtatccttgaacggcggtctgacgattaccggaaccgctaaactgaccaatcctctgacgcagggcacgttctacgttgacgcttctgaaaccggtaatgccattgccatcacggacagcgaagtttccggcggcgaagtctacaaaaaggcacttgagctgctagccaaggattatgccttctatagggcgaatggcagtcttgcggacgccagtggtcctaaactcagaactggaacatacacgatcaagtcgcatacatgcaactacacccaggacgaagcgcatggcattgcctactgcaaatgcggcagaagccacgcacacagagacttgagcgaagaaaagtcggtgctggtaaacggtgtctgccccatctgcggctaccattgcccgcacaatactgtggacgagactaccctctcctgctctgattgcggcgcaaaagtggttgccaaggtggaagttgagggctccgagcccacctacgcctttgacctcgcttccgcgtttcagaacgccgtaaacggcacgaccatcaagctgctggcaaacgagatgctgcccagcgatacatatgtcagcaaaaccctcacactggatttggacggacacagtctgagcggatacagcttgaatgtcggcggccttacgcccacgagccaggttcgcaccggtaaactgacggttattgacagcagcggcggcaacggcgcggtgggagtgaccgtgcgggacggcggtacgctggtatttgatccgaagaatggccataccactttgctccaactggaggtttggggcggcacagtcgagctgtacggcggaaagatttcgagaagcggtctgcggctgaataataacatcacattgggtgatctgcttccccagaaagcgggacttgcttactaccgtgacgacacgcagctcacgctggaggaagccgctacccagacctgcgacctggtggtaaagtcgtgcagccacggcggcaagaacggctttgacaaaagcgccactacctgcccctactgcaacgcgcccgcggtggctgaaacagccttgtacaatggcgagggcaaccgcctgcagcggaaatttgctgatttgcagacagcccttgacgcagacagagatggcggcgcgacccttaagctgctggccgacgtgaccggcgattataccatcgacggcacgcagaacacgggacttaacctgaacggctactccatcaagggcacggtgacggtcaagacggctgcaggcagcaacaccaccaccttgagcaacacgaaaaacacgaccacggtcagcattgataatgtcgttgcctacaagggtgcaaaactcgccgggtcgaaatatcctgccgtgatcggcacattgacgttggcagagggcgcgacgtggaaaacgattctgaatgacacagcacttggatacaaggtgctcaacacggacggcacccacaagtggtatgcccgggatgatgtcaaaggctcgcagttgaacaatgttattatcaatagactgcccatcacgaccaagactctgtatctaaaggtcaatggcaagaacctgaccggcaactcgccgaaggtggagcgcggcacgactgtccagctctgcgccagctgcaatgcgaaggatgtgacggtgacgttctccatcctgaagacgggcgaaacaacgcccatcaccttgacggagccgagctattccagtgggaagtatacaaaagattactccttcgatacaatcggagaatacaccatctatttcaccgccaccaaggacggctatacggtgcagagcgccgaaaagaagctgaccgtcaccaagccgaatctcagcaatgccgagatcacattcccctatggcaatgaagcggcctttaattctgtgtctgcgaccggtgtgccgatgtttgtcgtgacatacaacggcacaaagctggaagaaaatgtggatttcgtcatcaccagcggcgatagcacctacgatgtagggccctgtacgctgaccatcaaggcaacagacaacggcgattataccggaagcaagtctgccgaatggaatgtccgaccgctcaaagtagcggcttcggtcggcgacatcattaagacatacgacggaacgacagacctgcctgcaaatgcgaaaatcacatttaagagcgcggacagatattatactggtactacgcttcggctggctaagggtacagattatgaggtgtccaacgcccactatgattccgccgatgcaagcgaaaccgaaaagactgtctccttcaccatcaagttgaagaatccgggctatgtctttgaagacgacacgacccaaaaggactttacgctgaagggttcggaaacggacaagaccttcaagatcaataaggccaccgcgcccggttccgatctccaccctgcggtgacagtcatcaacgatctggcaaaaacctatgaaatggtactgtccaacgactacttgcctaagctgagttctccctgtgagtatggaaacgtcatctattcgttgaggggtacctacctgacggacggctacaaggacaccgttcaggccgaggttgtggaggaaaacggtcagtataagctgaagctgaccgttccggcagtggattacaatagggtaagttctgtcggcacgattgatgtccgggtcacctcggataactatcgggatttttacttaaccatcggggtgaagaccaaaaacaaggatgttcccgtgccggacggccccatcagcgcaagcgatattacctatggtcaagcgctgaatgacagtaaaatcgcaggtaagatgaaagctggcggcaaggcgattgacggtacattcacatggacgaatggcacgttcaagccagctgcgggcgactatccggcttcgtggacgttcaccccggcggagggctatgaggaatacgcgactgcgaccggaactgtgaccatcaaggtgaacaaggctacccccaccttcatcgctcccacggcgcaggaaaatctgacctataccggacaggagcaggagctgattactgcgggcatgacggaccatggcaccatgcagtacagcctgaccgagaacggcacatacagccaggacacccctaccggcaccgatgccggagcatataccgtgtggtatcgggtgattggcgatgcaaaccacaacgataccgcacccgccagcgtggcggtccgcattgggaagaagccgctgacgatcaccggggtaacggctgcgtccaagccttatgatggcacgacaaacgcgggcattaccagcgtaaccttcgacggcgtgaacttgagccgaggcacagactacaccgtgaccgccagctttgacgaggccagtgtgggcaacggcaagaacgtcactgccacagtgaccttgatcggaccggcagcgaagaattacgccctggagcagagcagcttccctacgactggcagcatcatcaaggccgctgcgcctgacttcaccaaggaaaccgcgctgaccattgtaaacggccacgaaaagacctacactgtgacgctccccgccctgcccacgctggaaacgcccaaagagtacggtgcgctcacctatgagatcggcgaaatcaaactaaatgacggctactacaccagcggcgcgaaggtggaaaacggcgagctgaccctgcccattcagaaaaatgacgtggaaaccaccggctctgtgggcacagtgaccgtagtgatcaagagcgcaaactatgaggacatcacgctgaccgtcaagatcagcgcgaagaacaggatcactcccaccggcacaccgacgctgagcaagaacgccatcatctacggcgacgccctgaataccatcgctctctccggcaagctccatgataatgtcaacaacgtggatgtcgatggaacctttgaatgggtggacggcacgcatatacccgtggttgggaacggtacctatgcagccgagtggattttcgaaccgactgacaccgagaagtatttaacggtttcgggaagatcgaatatcactgtcgaaaaggctcggcagtacggcaagctcagcatggcgggctatacttacggtaaaacgcccagcacaccgaccttgacagaccagacgggcgatttgaatgctcaagtgacctacagttatgccgctgcggacagcggctctgttcagacgtgggatatcagcaatccgcccgcgctgaacgccggtacctaccgtatgtacgccagcattggtgatacggataactactacggatttgaagctgtgtattgcgaatttgtggtagcaaaggcaacgccgacctacaccgctcccaccgggctgacggcaaaatacggtcagacgctggcggatgtgacgctgccggacggctggagttggatggatagcagcgaatctgtgggcggcgcttcgactgccgccaagaccttccaggcaaagttcactccgaaggacaccgaaaactacaacacagtggagaacattgaacttgaagtcacggtgaacaaggcagatggcggcaacctcaaaacggtcgagctggagcagaagtacacggacgcctcggatcacacctacacgccggactgggccggactgcccgccgggcaggactggacgttcagcagcgaagcgagcatcgtcctgcccaagcaggacttcgcagcggacggcaacttgctgacctatgccatctccggcggcaaggcgggtgacaagatcaccctcatcctcaaggcgtcctgtgacaattacgaggatttcaccatcacgctgaacgtcactctgacagaaaaggacgatcagaagccgttgaccatcaccggcaacacttccgtaatctatggtgaaaagctgacgctgaccactaccggcggctccggcatgggtgctgtaacctaccgcatcgacacagacgcgagcaccggcgaggcgaccatcgatcccaacaccggcgttctgactccggtcaaggtcggctctgtgagtgtcatcgcgaccaaggcaggcgacaacaactataacgacgtcaccagcgcccccttcgtgctcatgatcaaaccggccactcccaccggtgagcccaagtacaccaagatcacaaccagtggcaagacattgaaggacgtgacgctgaccatcgagggaagcactctgaatcccagtgacggcaagctggaatgggtggatgacaagggcgagcccctgcccgacgataccacggtcaaggccaacacgacctacaaatggcgcttcacgcctgatgatgacaactacacgaccctgaccggcgaggttgagctgtatcacaagtccagcagtggcggcggttggtacgacagctactacaccatcaaggcaactgccggggctggcggctccatttctccctccggcaatgtcagcgttcgtgagggtggtgatcagaccttcaccatcaccccggatgagggctatgctgttgccaatgtcaagattgacggcaagagcattggcgcggtgaagtcctacacctttgagaatgtcagcagcccccataccatcgaggccatcttcgtcaagggcactgccagcgccagcaccggagacagcagcaatcttccgctgtggagcgccctcctgctggcaagtacccttgctctgaccggcgccgtccaccttaagagaaaacgtgcacggtaatcgttttatcacacctttaaggccaacaaacagctcagcttccggtattgcccggaagctgagctgttcctttttcatcactacaagaagctaatcaatgacattttgagctgcgccgctatcccagcgcggcaaggagacagcattatgaaaagaatcacaagaatcattcgtccgatcatctgcatggccgtccttctcttcgccatgaccacggcagttatgggctgctatcagaaagagacggagcctatcgacattcccggcagaacgccttccggcacatctgcgcctcagccatcagcgactcctgaagtgataaaataatggtagacacaaaagtggctaccattatttttatgctattatagacatggaggtggcaatatggctggtaatttttaaaacaaacagaaatacaaatcgggatttgtctgtgaaaagcccgtgaataagcggatgttaatatgtattgcttgtggcaacggctctattgaatatagaattgagctatcaaaaacaaggaggcagagattatgctaaatgaaaatatcaaaagaattagaaagtcaaaagggctgtcgcaagaagaactggcaattaaactgaacgtagtaagacagacagtatcaaaatgggagaatggtttgtcagttccagattccagtatgctgattattttggcgaatgaactggatactactgtaagtgaattacttggagaacctgtagcagaaccgactaccgatgatttaaagattctttctgaaaaattagaagttattaatttgcagcttgcaaaaagaagtataacaaaggtaaaaacgattcgatggattcttatttcattgtgtgcggttatagtggtaatatttatcgcacttgcatctacgaatagtttttatttgaattggaattacaatgatcctgagttggcagtggcaggaacaatactgcatgggtttgaattcttgtttgtaagactcgcaccgattgtttttttgacttcggtggttggagttgtggtgacatataagaaaagataaattccagtttgccaacttgccctttgagagaggagaaatccctttctcaaagggctttttctatttatacggatattcgcaaactacgagataaagccaaaacttcattgacaatattacatattgtgaacttgacggtagaaaaagtcacaatatcgtagtataatattcttaaatcagaatgactaatcgaaatttgacggaggagaatgtgaaatgaaaatttatgacattgcccaagaggttttcggctgtcaggtatttgccggcgatccggcgcctgaaaaaaggcagctttgctcaatagaaaagggcgatttgtgtaacctgacggcttttggtatgtgtgctcacaacggcacgcatatcgacgcaccgtttcattttatcaaagacggaaaaaccgttgattccataggcttggacacattcgtaggaatggcttatgttgcggaatattgcggaattgtctccggcaccgcagcggcggaaatccttgaaaaagcgaaaaaacagaacccggaagcggcaatgagaattcttattaagggagacgcggaggtttcttcggaggcagcgaaagtatttgccgactcggggatcttactgctcggcaacgaatcccagactgtcgggcccgaagctgctccaatggaggtacatctcatcctgctgggggccggtatcgtattgcttgaaggaatccgtttggcagaagttccggaaggcagttatttcttaaatgcagcgccattaaatctatccggtgcggatggttcgccgtgcagagctgtactgatcgctgctgagagataaattccagtttgtcaacgtgccctttgagagaggagaaatccttttctcaaagggcttttctgtttatacggatattcgcaaactacaagataaagccaaaacttcattgacaatatcacatactgcgaacttgacggtagaaaaagtcacaatatcgtagtataatattcttaaatcagaatgacaaattgggatttgctgtgtcaactgtaccgatatatcacttaagcaattccggaacaagattactgtaatacgctgtcttgcctgacagcacatcgtcatagaatctctgcttccagtcaatgtatgccactgccttttgcagttccgtaatggattggagcaaggtttcttttttttctgcaagaatcaccttacgttccggaattgtgccttcgccctccatgcacaaagcaagatattgcttcatctctgcaatgctcattccacagcttttcaggcagttcagactctgaatccatttgatgtcatgttcgtcaaagacacgataatttcgcctgtctcgcttgacattggggaccaatccctcgttgcagtagaatttcagattttcataggtcatattggtgagagtacaagcctctttcatagaatacacaaaaaatcctcctgtttttgaaaaaaatccttgaccggtagtaactaccgtctgttacaataataccacagaattaaatttaacacaacaggaggcttttgttatggactatattactttgagcaacggtgtgaaaatgccacagttgggctatggcgtatttcaggtgacacaggaggaatgcgaacgttgcgtactggatgcactaaaggccggctatcgtgccattgatacggcacaaagctattataatgaagagcaggtcggtgcagcaatcgaaaaaaccggtgtggaccgtaaagatattttcctgaccacaaaggtctgggtcgagcattacggctatgagaaagctaaagcatcggttttagactcgatggaaaagctacgtacagattatcttgatctttgcctgctgcatcagccgtattcggattattacggggcatggcgggcattggaagaactatacgaagaaggaaaaattcgtgccattggtgtatctaatttttatcctgaccgtttggtggatatttgctccttttcccgcattaaaccgatggtaaatcaggtggaggtacatcctttatatcagcaggaagaggcaaagaagtggatggacaagtacagcgtacagattgaggcctgggctccgtttggcgaaggcagagggaatatgtttcagaatcctgtgctgaatgaaatcggcaaaaagtatggtaaaagtgcagcacaggttattctccgctggcatttgcaacgaggcgtagtggtgattccaaaatccacacatatcgaacgaatgcaggaaaacctgaatgtattcgactttgcactctcagcggaggatatggcaaaaattgccgcactggacacgaaaatgagtgctttcttttcccactatgacccggctatggtggaatggtttgcaaatatggtggaagaacgcaaaaagaaccatgacagtacaaaagaaaaaaaggattggtaagggaggaaaaggttagcaacgaaagtacgtaacataagcagataaattccagtttgccgaaatatatttctaactttccctattttacaggctttccagcctgtgcattagcgaaacgatatgtattttcccttatttttgcccttatgagataatcgtaagggaaataagggaaagttttatttagtcattgcctgccactttatcaagtaaccttgcagattcccgcttggcttttcttgtagagtgtgcatagacattcatggtggtactgacatctgagtgccctaacagttcctgcacatcctttggtgctgctccatttgccagaaggttgcttgtgtaggtgtgtcgcaactggtgaaaatgaaatccttcaaatccatccagtttctgagcaatcttcctgcaaacaattcctaacgtgcttggcagttccaaacttccatccggtcttaagcagacaaaggatatttccttataatcttctggaacattctctgttccgtccagatgatagaactcatagtaaactctgtttttgtcttttacttctctgtagtagtttttatggtaaagttctccgtactgcattcggtttttaagttgttcctttcgggcattgcgaagaatctctgccagtgtatctccaaaatcaacaatccttaccttttttcgtttggttggtccgatgatattcttgtgccttgaaccatcatatcggatactgcgtctgattgtaaggcactgttcttcaagattcacatcctgccatgccagaccacaggcttcaccgatacgaagtcctgcataataagctatctggattggaagtattgccggtggattgtaattctgtagaaattcaatcagtctttcataatcctctcgtggaattggctgtatatcgccatccatgtcatcatcggaaaacaggtcaacctcatccgtctggtatttcagcttaatatactgcatcggattgaaagtgatatattgctttggtgatactgcaaatcggaatgactgctgtaatactgccgagaaagaacgaatgtaatctttgctataaccttttctttctgaaccatctggataagtgccaccaaaggaaagcagatcgaagaaggcttgtaaatgctcagatgttacatttttcaactttctctctgaaattggatgcttcttgatgttggtaatggcaccgaggtaattctggactgtcccattactgagcgtaccggtctttaattcttcctctgcccatatatcaagtaattctccaattgtaatattttccgactttgcaatgaatttcttgctttcgtaatcgtccattgcctgacggagcagtttttccgtttcacttttactttctgttccagcgtattctttctgaaccagattgccgcttgcatcttctacatagaagcggtagtaccatttctttcctttttttcttacagatccttttgccataatcgtgtgtctcctttcgatatcagacaatcggaactgatgaaatgcttcttgcgtgtaagtatatcataactccggttgtcgttctataccgaatcggaatcctcatacaaaacttctgataaaagattttcaagcctttgttctgccatttccggtttcttggaataaagccttacgatatctgccatgtcgttaaaggcattaacagtgtgggtgatctcccggagaaacataatctcgttatattcatcattcgattcaaaccccattacttttgcaatatcagcttcattcgtgttgcccttgtaattcttgcaggcaaactggaatgattccagaaacaggttatattgctttaacatcaacagcagtaaatctttggaaaaagcatcttcctttttactaaggtcgagaggtaactgtttgagaatatcgcccattgcatcacgaatctgtaattctttcttatccgtaatatcggtttcgtattcattggtttcccctctgagccattcaatagatacatgaagtgcttccgaaagaccttccagcaccatctttttggtattgtcaatcgaaccattctcataacgcaggattgtggaagctgtaactcccatcttctctgcaacataaggctgtgtcagatttaattccagacgacgctgttttgccctgctgcctatcagcttgcgtagttctttatctttcatgctgattgcctcctttttcggtatgtatgaattatagcatgtacctcacataattgcaatatgcaatataataattatttttaaaatttcataacgcttgacaacacaatataaaaccgctatactaacagcacaacaaaaattgcataatgcaatttataaggaggtgacaagatgacggaaagaaagattgcattatccatcgaggaagcagccgactatacaggaattggcagaaacactttgagaaagctggttgaatggaagaagcttccggtattaaaggtcggaagaaaagtccttattaaaactgacattctggaaaagttcatggaagccaacgaggggcgtgatctgagggataaaggaaatgtaaaagctgtcacaagaaatgtggcaacttaaaaaggcggcttcctaagaaaccgccaaaggttctatcagaccgaagccatgatatacctacacgcaagaggattataccatgtgcttctcctgatatgcaaccgggaactgttgtttatcggaaaaagaaaggatgaagacgatatggcgaaatcaacaaagacttatgaagaaagaatacgtgcattagagaaaaaggaacaggaaagcattgaagctacaaaaaagctcattgcacagcggaaggaactggaaaagcgaaagaaagcagaggaaagtaaaaaacgaacccacaggctctgtcagattggtggcgcagtggaatcggttcttggctgtccgattgaggaggaagatttaccaaagttgataggcttcttaaaaaggcaggaaacaaacggaaagtttttctcaaaggcgatgcagaaagagccacttacagatatggaggaagtgtaatggcggagggagtggtttttccattcccttcattgcctttgaatgaagggcgcacttatggacaaccagaggtcgtccttataagtttgccacaagtggcaaccggtctgcgcttacgcttgccgggcgcgttccgtcggcggggctttcagccagacctgctcatgccgcagggggcactcttgcgcagagggcgttccgacagcttcacttctgccaaaccagaagaagatgctgtcggaaatcaatgccggatacggcagaaagggggaatcgtatcatggcgatatttcactttacagtaaagattgtcgggcgcagtaaaggaaaatctgtcatatccgcatcggcatatcttaatggagatgtgatgaagaatgaggaaacaggcagaatcagttactatacttccaaaaaggaagtcgtctacaccagtctgatgatgtgcgaaaatgcacctcctgaatggctgcatgtaccggaagaaaatataaaaagggttcaacagtctatccgttataaaagagcggacgataaagaagccgcactggaaaaatttaaaatcacatttcagaaacagcggttatggaatgaggtcttgaagatagaaaaaaatgcagatgcacagcttggacgctcatttgaattttccttaccgaaagaatggagcagacaggaacagattgattatacaaccgaatatattcaaaaaactttcgtagataagggaatgtgtgccgactggagcatacacgataagggtgatggaaacccacatgtgcatttacttgtaaccatgcgaccattcaatccggatcattcatggggcaacaaagaagtcaaggactgggattttgtcagagatactgacggaaatatcgtggttgatgaatcccacccggactggtggcaggataagaaaaatcctgaccggcatggaatccgcattccggtacttgatgaaaacggagtacagaaagtcggggcaagaaacagaaaacaatggaaacgggttctgaccgatgctaccggctggaatgatccaaagaattgtgagttatggcgaagcgaatgggctaggatgtgtaaccggcatttatccatagacaatcagattgaccaccgctcttatgaaagacagggcaaattgaaagtccctacgattcatgagggtgcagatgcaaggaagattgaggaaaaatatctcaccgggcagataaggaaaggttcatggaaggtcgaggaaaaccagatgataaaaaaacaaaatgcactgctgcaaaaggtaatcacaacctttggtaaggtatccggtgcattgtcaatatggaaggagtggttgaatgacattagaagaaagcaaagaagtaattcccatgatggaagcaatgattacacagatagaggaacagcagaatatcatggcagagatgcttcaggagatacaggaaaaggacgagaagctgatgtgctttcaggagcaggaagaacgattgcagcaattagagaaagaattgtcagagctgctacaaatcttaccgaatacagaagaactgttgatgcttctggaagaaaagacagaccagatacagaaactcacagacgaaaatcagcaatggcaggaattggcacagaaattaaacagcgagaaccggctattgcagaaacagaacagcgaattactgaacttgaacagcaattagagaaaggaaggttgattgatgaacgaattaagaaactcaaagagcgacgatcaactggaagaactgctaatgctgacggagcagatgcaggaagaactcgaccagaaagacaggactatccgggaactgaaaatgcagctcgacgaatcgctgaccttgaacgagaggttaaacagcgagaacagagcagggaacattcaagccttaaagaacgacttgaggaaaacaaaagaattattgcagagcgagaaagagaaaacgctcaccgcaaaggacatgatagaggaatgtcgcgataagctaagacaggcagaacaggaacgggattatgcactctcccatcagaaaaaagtagagataccggttgaaaagtcggtgctctatcaaaagtgcaggaattgtaaccagacagcttatctgaaagcgaaggaaaggtatgatacgcagagagaaaaaatggcaggcagatataaagcaaaaacagctatgtatgaagcattgatgtttctgctgatatggtattccgcatcaactactctttttcagatgatacagtcaaaggtatttatttctgattgcagaatattctttggtgcaatcggaactttcacacagactattgctggctggattgcactgataggaaagaatgtggcacagattagtaatggaatatccaatcctgtcattgccggaattatatactggctgataggaatattgatttgcggtggatgtctggtgggtgcgggaatacttgtagcgtttatagggataaagattgcagggctatataagaaatactgttgggatatgattaccatactggtaacacttataagcctggaaatagcaatctactttggagattggataaagacagtcttgccgatcaatatgctatttctcttattattggtgcaactggtatatgttggaattaggtggtatgtaaaaggatggcaagaagccagaggatattattaaaaaactattagaaactattcatatttactttcgtgctaggacagattattctaaaaattcagtgatgagcatgcacatgaaatcttacttcgtttaggtacgaaaaagggcaatggaaactttgtgttcagatgagctctcactatcttggtaacaaccgcaagcagcagtggaatattgacgatgcattccgtatatattccacacatggctaagcccgactagaatgtgggtgaaaaatttcacgagtgccagagtttcctctggcactcattttattttcgctgtgcgttttttctgtactccagtggcaacaatccagtgcttttacggaataattctgcaaatcggcttgaagtggaatagcctactgtttgggcaacttgcccgactgtcagctctgtatatgccagcagatattctgcttgactcatgcgccgctgttgaacatattccgtgatggtgcagtcgtagtatttcttaaaacagcttttgagctttgttgttcccatgcaggcaatctgtgttagccgttccagaggaatatcaaaagcatagtgatcgctaagataagcggcaactatttggagattttcaatatcctgttgagagagcttatgggctggtttatcaggatgtttcttctgatattccaccaccattgaaacagcttctgcgactttactctcataaaaaagttttgctgcaatcccttccccgcgatagtctttgatttctgtgagtaaccgtgacatttctggaaagtcggatgtttggtcgatcttccgaaatgcatccacaggattgatctgtgcctccgggtacagttttttcaggtagtcctcataatatgccggtgcaatctcaatcccaaccgaacggattggaatatttttatgtatcaaagccttgtatggagcgtagcctccaataaatgttttgatacaaccggcagacagtctacggtatggagataattcctccccggaaatagagtcataccgagtgatactcagacattccggcatggagcattccaacatgaaatcttcgtggaaggaaaagttatggattttaatatcatataagtctttctgtccataagtccagtaggtgccttctccaacttcgggagaaagtttccagcagtcacctaatgccccatattgctggttgtctgggtcacggataaaaccgtgtccaatcagtagcggtgtataaaactggtcaataatttcagacatgaaaacagaccgcctcctttttgcaacgattagacgaacttttgaaaggaacagacgaacattgccggaacctattgaatgttgttcgataaatgcgtattgtattagacgaagattagaggtatctaaccgaagaatatcacaaaccacttgtcgagtcaagacaatgaaaggtaggaggtcaaaatgagtaatcaagtaaattctatgaacaaaggtctgacagtgaaagaccttgtaacaacaggtatttttactgcactgttatttgtttttgtattggtgggcggtgtcttttttgcaacgaatcctgtacttacttttttcatgccagcaggaggtgggctgcttgctggccccatttatcttttgctgattgcaaaagtacataagcgttggagcctttctataatgggcgttatcatgggtattatttggttcgtgactggtatgcactgggcttttgcattgggctacatgatcatggcgattgtcgcggactttgttgctggtgcagggcagtacaaaagcaaaaaactcaacagcctgtcttatatcctgttctctctcggtggcactggttcatatatcgtgttctttgttgaccccaacggctgggcgcagaccatgttggggaacggaactgaacagagttacatcgacaccatgcaggcaactgcaaataccggcatcctgattgccatgtttgctgctgttatcattacatctgcaatcagcgcttttgtaggctgcaaaatgctgaaaaagcagtttgaaaaagcaggtattacagcatgagcggtaaacgccacaagaaagagctttggctcgacccacgggccaagctctttcttattcttatgtgtgttttatcgtccatgtttgcgccctcacttgcatatcaatttatccttgttatgctgattgcgatattgggggctttctttggaaagtggaaatatgtcattaaggctgtatgcttttatgcggtcatctgtgccctgacagtttggatcatggcagaaatgacaggcacgctgcggacaatgtttattgcctttttaggcttgtttcataaggtctatgcgtgcggaaccttggctgggattgttctgactactacaaaagtcaatgagttcctgtctgctatgaaccgtgtccgcgcacccaaaaagttagtaattcctatggcagttatgctgcggtacattccaactattcaagaggactggcgctatatcacagacgctatgcgaatgagagatgtttcaccatctctggcgggctttttaacacatccgggcatgacggttgagtgtatttatgtgcctttattgatggcagcttcaaaagcggcggatgatctttctgttgcttctgtcactcgtggaattgaaaatcccaatccacgcacctgtcttgtccagataaaatgcggaatttccgattggggcgtcatggccgttgccgtagcttatctgatttttgaattatgtgtgcgaggaggtgtgatcggttgattgagtttgaaaatgtatcgttttcctatacggggcaggaacatggtgggctgcgcgacatcaatttgaaaatttcggacggagaattcgtcctgttctgtggccgcagcgggtgcggaaaaacaacgattacaaggctggtgaatggactgatccctcagttttatcagggggagcttcatggccgtgtgctggtagatggtcaggaaatcagcaatatccccatgtatcagattgccgctaaggttggctccgttttccaaaatccacggacgcagtttttcaatgttgatacagacagtgagattgcctttggaattgaaaatgaagctcgccctcctgagaaattggctgagcgagtagagcagacaactgaagatttgcatattcaaaagctgcgaaacagaaatatttttgagttgtccggcggagaaaagcagaaaatcgcctttgcttctgtttatgccatgaacccacagatttatctattggatgaaccatcctctaatctggatatgacttcgatccaggaactaaaggaacatttgcggctgataaaaaaacagggtaaaacagttttgatagcggaacatcgtctgtactacctgatggagttggctgaccgaattgtttatctggaaaaaggagaaatcaaaggaatatacaccccggaagaattttggcagctatctgaacctgatcgtgaacacatggggctgcgagctgttgatctacaggcggtattcccgcaaaaagcccacttgcctgcgcctacccctgtattggagctgcggaatgtgacgctccgttacaagaagcaaacaattttgcatgacattgagctatccgccggaaagggcgaagtgattggtgttgtcggccacaacggagctggaaagactacattttcccgcgctctctgtgggcttcacaaagactgcgatggacaatttttgtgggaaagcgagccgattgagcgtaaggaaaggctgaaacgctcttacatggttatgcaggatgtgaattatgaacttttcgctgacagcgtggcggcagagtgctcctttggtatacgcaatccagatcaaacactggtaaatgcaactttggaggaattaggccttacccaatatcgggagcgccatccaaacacgctttctggcggtcaaaagcaacgagtagctgtagctgttagcatgatttgtgggaaagatctgctggtattcgatgaaccgaccagcggccttgattttgacagtatgacgcaggtggcgggactgatccgccggttgtccaatatgggaaaggttattttcattgtcacccacgattttgaatttgtctgccgtacctgctcccgtgtcctgcattttgacgagggcgaaatgcccgatgatgtaccagttacaatggatgccctcccgaaattgagagagctgttctctgtttcagatggaaaggagaggtgatctatgaaacagaaaaaagaaaacagagtagctttgctgctccactgggccggtgagcaaaaaatctggctgttcctggcaatttttctatcggcggtcagcggtctttgcattatcgtcccttacattggaatttaccggctgatggacgccaccttcaatcatacctgcacgcaggaacttgttgtacataccgtggtaatgattgcagtgacggtaactttgcggtttaccctgtttggctgttccggcgtagcagcccacaaaggggcctatggcgctcttttcaaagtgcgctgcatggttgcagaacacatggccagagcgcctttaggggccttgaatgaacggcgcaccggggacataaaaacggttctgaatgaagatattgaaaagttggagctgtttctggcccataaccttcctgaccttgtgtgctatctggtggggccggtagtcatctttatttatctgatgaccgtcaatattcctttggcattgatttccctggttccgctgatccttgctgttgttgtaatggggatgatgttccgcaatacggatgacctgatggaacgggccaatcactccattaccacactgaactcggttatgattgagtacatcagcggcatgaaattgattaaagcctataacatggggagcaaatcgtttcaaaagttttcagacgctatccaggaagaaaacgccatgtggaatgaaacttcccggcgcatggggccaccttatgcggcctttgttgttatcatcgaatgtgggatgttgatgatggttccaatcggcggaatgtttttcctgaaaggctcactggctgccagcgcatttttgctgttcgtctatgtaggttccatgtatctgacggaaatacgccccctacaggaactggggactaattttgccaatgtgctgaacgctgttactaagaccaaagagatactggatattccaatttatgagggtggagcggactttcccaaaaatcacgatattgaacttcggaatgttcggttttcctatgatggcaagaccgatgtactgcaaggcgttaatctcaaaattaaagatggtgaacgcatggcccttgtgggacagtctggtgccggtaaaagtaccgtgattgagctgatctcccggttctatgatgtgcaggagggcgaagtgctgattggcgggaaaaatgtaaaggaactcaattatgatactatcctaaaaaatgtcgccattgtgttccaaaagaccttcctgacccgtgacagcgttttagaaaatatccgcatgggcagtaacgccactctggaaaaagtacggaccgccgcaaaagaggcgcagattgatgatttcatcatgtctttgccggatggatatgacacgaaggtgggcagcttcggctctcgcttctccggcggtgaaaaacagcggattgccattgcccgcgctatcctgaagaatgcccccattttgatcttagacgaggccacaagcgcctctgacccggaaaatcagatggagattgacaaagccattcaaaatctctgtaagggaaagactgtcattgtggtagcccatcgtttgagcgcgttgaagatgtgcgagcgtgtagcagtggttgaaaatcacacaattacctgtgtcggaacccatgaggaagtccgaaagaacaatgcttactatcggaaggcgtgggaggactacgaaacagcccggaatattacttatcagttggagggaggcgagcagcatgagtgagcatgatgtattgaaaaagaaccgtaatttttatattggcgttggcgggactgttctggaagggcttctctccggcagcctgtttatgctgctttactctgtcatgcagtttttgtggtcgggacaatttgacatgaaccgtgtcctggttctgacctgtgtgatcgcggtggtttttcttcttcgtatcctgatttacagctatggctataccaaagcgcagattggcggtgcagaggtcagcaagaatacccgcctctttatgggcgaccatttgaagcgtatcccgctttcccggtttacccagggacagaccggcgattatatcaataccatcacaagcgatgtaaacaactatgaaaaaatcctgacccataagatcggtgatatggcaaagagttttgcactttcgctcatgctgattatttttgtgatgaccatttatgtgcctgccggaattatcctgctgattgccgacttgcttttgatccctggactgtggctttccttccgtatggttcggaagtatggtaaagaaaagaatgatatttgtgcagagaatgtcagcagcattgtggagtatgtgtctggtattcaaactttccgggcctatggcgtaggtggtttgaagaataaaaccgttatcaacgctatgcgggagttctgtcggatcagctttgtgtacgaatcaaaagtgcttcctattggtgcggtctttggtattttgagttggctgtcctgcccgctggttatcttgctggcctatgcaccctgggtcgcagggacactgaacacggtggactaccttttgatttgtatgctgcccctgttctgtgcaaagctggctaactcgatttttgtagacctcaccagttataagaacctgatgatctcgaaaaacaaaatcttgagtgtaatgaatgagccggaggaaactggcagcatggagccgcttcacacagctactcatgaaatcacatttgacaatgtagattttgcatatgttcccggtgaaccggtactaaaacacgccacctttacggtgccagatcaaaagctcacggccattatcggagactctggctccggcaaatctactattttgaacctgattgcaaaatattatgaagcaacgggcgggatgatttctattggcggtaaacccattaaccatgttgccgcagagcgtgtactggagcaagtttctatggtagaccaggacatatttctttttgacgataccatccgggataatatccgacacgctcgccctaatgctacggacacggaaatcgaggctgcttgccgggaggctaactgtgacagcttcatccgtaagatggaaaagggatacgatacgccgactggcgagaatggaaatcttctctctggcggtgagcgtcagcgaatttcaatagcccgcgctatactgaaaaatagccccatcctgctcttggatgaagcaacagcatctcttgacattgaaaatgagcttgccgtaaagcaggccatcgctaatctattaaaagagaaaaagacagtggtaatgattgctcataccctttccattgtcaaaaacgctgatcaaattcttgtaatgggtgatggcaggattgctgaatctggaacccacgaggaattgcttgcgaaaggcggaaaatatgctgctatgtggaacgcagagcaaaaaatatcggcttgatagaagctaaagaagaataattgcatagcgcatgaacctgccccgactacggggaaagaaaaaaacgctggctggggcaggtgattttgcgcgcctattttaagttattatcctaacggcggttttgagaaatcagagccgccgtttcttgcgtatacctaaaaggaatcttccgcatctatccacatttgcatcgttccatcaagatacaatcttgcatactcaagtggttcatcaatggcaagtgcgtttaatgcacagtcagatccgggagtagttgttaaattcttctccgcttcccagcagtcaatgcggagcatatagccagcagaagtataaacatcaatgctgttgcgttgtggattgtattctgcaaatatcgttctcatcgtatcaaatctccttatcgttcaatcaatcatttgttgcaaaaatcagaagcatttcaatcagttcaccatgtcacttttattttgtgttatactgttttataagattttctttcccttgttttttcccttatcagagttcgtaaaaactcatgggacaatataatacaagggaaacaataagggaaagctcacctgcgacaaacttagtgttttcaagggcttgagagatatttgataataaaatataacagttattaaatccctttgaatatatgaaatctcaattccagtttgccgaactgaatatagcgtacatagccgcttggttttcaaaagaaatcaggcggctgtttctattttgaaggaggtgttcgctatgagcgaaacagattacaacgctcgcctttatgagaaaatgaaagccgagcaggacaaatagcgcttgcctttttgtacttgatatgatattattggtatgtgtactaaagtgtttaaagagaggtgatatatttgcgaagagacagcagtgaaacaaagcggaaaatactgaccgtgtgcgtccgtctctttctggaacaggggtataaaaacacctctgtcagtcagattttggacgaagcgggcgtggcaaggggaagctatttgcatctgtttcccaccaaggataaaattttgctggaattgaccgaaacgatgttcggcggacagttcggcgtggcaagaagcattgcagacagcaagctgccgccggtttacgcctatgcggtggaaacggcgatccaactgacactgaccgagctgaacgagaacctgcgggaaatctacatcgaagcctattccctgcctgaaacatcggagtatatctacctgcataccacggcagagctgaagcagatttttggtgaaaatttccccgatgataccgagagcgacttttatgagatggaaatcggcacggcgggactgatgcgcagctatatggcgagaaaatgtgatattcattttcctctggaacgcaagctcagccgttttttgacggcggcgatgcgggtgtatcgggtgccggaggaagaacaggcaaaggtgcttgcctttattcagtcattagatattaaggcaatcgccacagaggttatgtataagctgtttgccatgttggaaatgaaatacgattttaagctgtcaaagaacggcgaaatggaggaaacaagatgaagaaacgattattcagtatcctgcttgctctgtgcatggtgctctgctttgtgccgactacggcatttgccgagagcgagacggaagaaccgcctgtttgctgctgtgaaacagcctgcacggcggaagcaatgaacgcagattgtcccatctgcggcacagagggcgctttgccggagaactgtgcaaagtgctcccagcccgcagacgatgcggcagtgcagccggaggggaaagtgtctgacccccagccggaggggaaagtgtctgacccccagccggagaaagaagtgtctgacccccagccggaggggaaagtgtccgacccccagccggaggggaaagtgtccgacccccagccggagggggaagtgtccgacccccagccggagacagccttgacggcgttaattggcggaaacgagacggcaaaagatgtcagcaccgcggaagaactgactgcagctattgctgatgttaatttcgacaccgtcaggctgacaggggacattagcatcagcagtaccctgaccgtcaaccgcaccgtaacgctggacctgaacggtcatgtgctcaaatacgagagcgcaaacaatggcagcgtgattgtggtcgagggcagcgggcagctgactatcgaggacagcaatacgagtaatctctcgcacaaattcaatccgaatggcaaactgtgggtgctggacgaggcaagcggcacagagaccgtcaccggcggcgtcatcaccggcggcacgggaacggatctctcaacgtacggcggaacgacgtggtattgcggcggcggcgcgctgatcaaaaacggcggcagcctgaccatgaggggcggcaatattatcggctgctccgcagagtgcggcggcggtgtatgtattgattcggagcgaaatggtgaaccgggccagttctctatgtccggcggaagcatcatcggctgcgtcgcctccaatagcggcggcggtgtttttgcttccggcaagttccaaatgtcagataaggcggtcattcgcagctgcaccgtcgaaagcacgatccaattaatttgcggcggaggtgtatatgtcaacggcagcagcagctttgaaatgtctgatacggcaaaaatcgaaggctgtcaggcaatctccacttctgcctacggcggaggcgtatatgtcagcagcagcagtagctttgtgatgactgctaaggcagaaatcgaaggctgtcgggcaatctccaactcttccaactcttccaagggcgggggcgtccatctctcaaacaatacgaagttcaccctgtcgggcagcgccgtgattcaaaattgcacggcaacaaatgccgccaactccggcgaagcctacggcggcggcgtaagcgccgcttgtgtgaaggagatcaccttggcggacagtgcgcgcattgtcggctgtgctgcggcaaacggaagcggactatacatcaccggctctcaggtacctggctatgggaaacttttcgccaacggcggctcggttgacggcgacgtcgtgctgggagatacagaagacggtcccagtaccattacaggctccggcgggactgtgttcaatggcaaagtgaccgttacccccggcagcaccatcgaaagcggcaaattcaacggcgaggtcatcaacaacggaaccatcaccggcggcgtctttaacaacacagtctccggcagcggtaccatcaccggcggcacatttaacaccccgatgaccggcagcggcacgaagaacgacccctatcagatcagcaccgctgaccagctgaagctgttccgggatattgtcaatggctccaacggccagacgcagaaccgtggcgcgtatgctgtgctgactgcggacattgatttgaataacgaaccgtggacgccaatcggaaactataccgaaggaaatcagatttactacgagggcacatttgacggcggcggctacaccatttccggcctgaacgttacgggcaaattcaggtgtgccagtctgttcggtgctgtaaaaggcggcacgattaaaaacctgacagtggcaggtaacgtatcccataattattcttctacgggtctagactgtcacgtcggcggcattgtgggcagcgctttggatgctgcgacgattgaaaattgcagcaacaattgcagcgttactggcggcagtggcgattttattggcggtattgctggcagtaatattaacaatgcgagaatcatcgactgctataatgttggcacaattaccggcacaattattgaaactggcggtgttacgggatttaacatgggcacgatctccaattgctacaatgttggaacgattaaaatgctccataatagtaatgctgttggcgaaatcgttggcaataatgttggcactgtaaaaaactgctactatcttgccggtacgaatctgaacgcagttggccaaagcaataatggcagcattacaaaaacagagtccaaaaccgccgcagacttcgccaacgacacggtgctggcgctgctcaaggctgaccgcgacaattctccgtgggacagctgccagtatgtggctgcggcaaaaataaccctgcccgtgttcaagggacagggcgatgctcatgagcacaacggtaactggacatcgaacggcgacggcacccacagccgccactgcacctgcaatgtcgtggaaacacaaaactgctccggcggcacggccacctgcacccaaagagcaacatgcacagtttgcggtgcggaatatggcgatgctctgggacatgattttactaccagttggacacatgatgataacgagcactggaagcagtgttcccgttgcgatgcaaaggatgacgtaagccctcatacttgggacagcggtacgataacaacagcgcctacctgcacaaaagcgggtgaaaggacatatacctgcaccgaatgcagcgcaacaaagacggagccaatcgacgccaccggccacagctggaagtccgattggacgtccgatgcaacgcatcactggcatgaatgtgccaatgaaagctgcgatgtgacggataacgcgggaaagaacggctacgcggagcactccggcagcaaagcgacctgcacccaaaatgccgtctgtgagatttgcaaggcaagctacggcagccttgacccgaacaaccacaccgacctgaaacacattgacgcaaaggccgccaccgctgctgaagaaggcaacattgcgtattggtactgcgacggctgcaagaagtatttctccgacaaggacggaactaaggagattgccaaggcagacaccgtgacggtaaagctgcccccgaaaatcacagccggggatggtgcagcggtcacgcagggcgagaaaaaggaactgaccttcacttctgacgcatcctttgccgattttgttcgtgtagagcttgatggcactgcgctggaagaaaagaactatacgaagagagagggcagcaccatcatcacgctgaaccgtgattttgttgccgcgctttccgtgggcgagcatacgcttgcgatcgtttctcaacacggtacggcaacagctaagttcaccgtcaaggcaaagccgacggaaacggcaaccccgcagcccactgtgaccccgcagcccactgtgaccccgcagtccactgtgaccccgcagccgacgccgacggtgcagcctgtttccccgattctgcgcaccggcgacaccgccaaccccgcattgtggtttgcgctgctgattgtcagcggcggtgcagccattggcacaacggttgtcagcagaaagaaaaagcataacaaataatggaatagcgttcccttgctccatcttccgagcaagacaaaagcgtcgtagcaatacggcagcgaaaaggaggtgcctgctatgccccgtatgccgaaatacctcaagagagaatgggcgttctttcttgatatactcgctcgaattcatctcttttttattatttattaggtcttattataaagtgtgatataataaaatatattatgaaaggttgaatcgtaatgaagaatctaaaatgccaaatacgcaatcttgaaaatattacagtttctaacgaagactacactgctgttgaaaaagagctgcagcttctggggaaaaaactactaactgagtatgtcattaaaatcggaaacatagaggttgagcctttatgggtagaagcatattattcaaacatatcaaagaaattttcggatccatttattcatggaaaagaggaacaaagcaaattttgtgttttatattttcatcatagcacagatgattccagaagtggtgtggatatttgcctttctttatgcgacgaggataagaataaaagcaaatattacctatcgtatttactcaaatacactttagtgaatggtgagtttacaacacaatcgcaattaagcgctaagattcgaaaagcatataattcactatctgaatcagataaaagctgtattctttttaataagacttttaatgcagcaaacacgaatgacatcgtaggatatactacacgaatcggacttaaagcgacagattctaatccgggtacagagaaaattaaaaaatcttatatatcattaaggttggctatagccaaaaatttcgacaaatcatatccttgcgaaaaaaggcttcctaaattagaaagtcttgctgataactatctttcaacccatgagttgggcaacaaagaaaattggtacatcgatcatttcgggtattgtccccaaaagtataaaggtaaataatatgctctgcttttcatcacttctaaaaaccattcccgaatacgccgcgtcggcgggaaatctgtttaccgctttatcaaaatgcggtgaagaatatacttttttcgacggtgcgaaggatatatgggcaaaggattatatgccggtcaaaacagggagcagcaaatacatatcctttcgctatgagccctgttatttaaaagacgatccccaactaaaaaccgacttcaaaaacgatgtcgcgccaaagctcagtttgcccgtaatatactcgaacatcaatcttgacggcgggaatattgtgttttctccgtcaaaagaaaaggcgatcatttccgacagggtgttctccgaaaatccggaatacgaaaaatccgtgcttatatccgagctcgaaaatcggcttgaggccgaaatcatcattattccgtcgcttaaaagcgatatgaccggtcatgcggacggcgttgtgcggtttgtagacgaaaaaacggtgattggcaacgcaacgccatataagaatggttatgagcaacgggttaaagcggctttgagaaaaagcgggattttggctatcgattttccgtattttgagtcttacggcataagtgccgtcggcagttatcttaattttcttgaaacgcaaaagcatatttttctgcccgttttcggcgcctctgaggatgaaagcgcaataaaggcagcaaaatgtatttttgctaaagagataatcgccgtaaatataaacgaaattgcacaggatggaggcgttttaaattgcataagctgggaaacgacagtatgaccgcaaatgacaaaagaaacgaaatcaaggcggtacttacggcaaggcgaaacttttacaatgccggtgttgcacttttggagtgcgacaatgtatatgcatcgaacataaaatttgcacttgaaaggctcaccttttcaagtcctaccgttccttttgtaggtgcgggagcggttaaaaagcaaattgacgaaaccgatataatgctttattagcgattttttctctacaccccttgcaaaccagaaaaaagcgcggtataatatgaccagaagaaccgaatcggtcatatttaaggaggcgtgagcttggcttttaccgattacgagactgagcagctccgcaaggcgttgctgaaggaaacgagacattgtgctgtcacgctggggatgaagaaaacctcagtggatcaactgacaaaggcggtcggtatcgcaaaaggctcattttataaattcttcgaatccaaggagatggccttcttcgcggttttggaaagtatccacgccgaactttacggggtggctgaccagacgttgcacagaaatggcggtctgccaacatcggagcgcgcggcagaggcggttctggccgtctgccggcggctgtctgataccggcgacatggttttcattgaacatgacgccaagttgcttttacagagattgccggagggcatcaaaaaggaacattaccacgatgacgagacgcacattcgtctgcttctggaaaaatatggccttgttcctaaacgggggatttcacttgccgccgcgacagtacgcggactgattctgaccgtctcacacaaggagcaaataggaggactgtacccgcaggtgctggaaacgctggtgtgcggcgcttgcagggagttatttaaataagcggaaggccgcagagatgcggcttttcgaaggtacaacggttagcaccatctaaccgctcggatacgcgcgtcggttaggttaatctaacattgaaaggaatgatagcgatgcagggacacaagaatttctgggacaaaaatgccggacgttacgaccgctttatgcgaaaggatcgggcggcgtatgacgagatgtatgagctgatccggccggttgtaaaagccaagacggtgttggagctggcgaccggcacgggattgattgcaaaacacatcgtaaacgcggcggcgcacattgaggcgacggacgcctctgcggagatgattgcggaagcaaagcgagatacccgctctgccaagctgcacttctccgtgcaggatatgttccgcctgccctacgcggaggagtctttcgatgtggtgatcgtgtccaacgcactgcatatcgtgccgcagccggagaaagccctgcaagaaatcaagcgggtgctgaaggacgacggtgtgctcatcgcgccgaccttcacccatgccggaaactcgttttccggcatggtcagggcattttttatgaggatggcaggcttccctctccgcagcaagtggacgagcgtggaatacctgcgcttcctacggcaaaacggctggacagtgcggaaaagcgctgttctgaaggcatccttcccgctgacctatgcggaatgtgtgaaatcggaggtgtgataagatgtcattttttgagaacaccagaaagcctgtgggacttggcgggaaaatcatggtcgccatgatgaacctggggcacagtcctgtggcacggtggggacttcgctttttggagcttactctggacgccaaggtgctggactgcggctgcggcggaggggcgaacatcaagagactgctgaaaaaatgcccggagggtattgtcaagggcattgactattcccccgtcagtgtggagaaatccaaaaaggtcaacgaggccgccatagcggagggccgctgcaccgttttgcaaggcagcgtggaggatatgatctttgcaggcgactggttcgatgcggtcacggcctttgaaaccgtctatttctggcccgatctgccgcagtgcttccgggaggtttaccgggtgctgaagcccggcgggacattgctcatctgcaacgaaagcaacggcgatacggacaaggacaagaagtggacggagatcatcggcggcatgaccatctacaaggacgccgagctgaagatgtatctggagcaggcgggctttcacgatgtgcagatacacaaaaagaaaagctggctctgcgtcacggcgcggaaatgaggaaggagcaatcagatgaaggacaacgagcttctattcgaccgcaaaagtcatgtgcagtattgacggctattgggtggaacatacgagcgcatgggaaatcccgggaacggaagacctgaaaccctacattacagccaaggataagggcaaaaagtggctgttcggcacaattggtatggcggtcatttcggcagcactggcggcgattacgtcggtatttattcactgaaggagatacctatatgaaatacaaaatcgagaaaaacaccgtacaggagacgctgatccttccgctgtatgcgcggaaggtctgctcagaactatacccgaatctttaccgggacgaaacagcggttcacctgattgacgagatcgactacgatttttctgagtcggagaaaaactcccgcagcctgatgcagcgtttcggttcactggaggtggccatgcggcagaatgaccttgctttcgaggtgcgggattatctgaaatctcaccccaatgcggcggtggtcaatctgggctgcggactggacagcaccggaagaagctgcgacaacggcagctgtaaaatttacaatctggactttccagatgtcatagccgtgcgtaacgaacttttgcccgccggggagcgtgaggaaaatatcccatgcgatttgaacaataccgaatggtttagaaaaattgacgcttcaaacggcgcggtattcttttcctccggggtgttctactactttttgactgagcaggtcaaggcgttggtacagcaaatggcagacgcttttccgggcagcgtgctggtgtttgacgctgcaaatcggacggcggtgaagatgattgcaaaaacatggcttaaaagtgcgaagattcaagatgtgggcgcttatttcgcagtttcggacgctccccaagagatcagtgcgtggggtagccgcttgcaggtcaccagccgaggctatatgctgggctacaccgatttgaaagacccatccgtcagcggttttttccgttttctcgccaaaatcggcgacggaatgatgaagatgcagattgtaaagatcagatttggaggcaagcaatgaaaattctggtatatggtgcaggggttttagggtagtcgaagtggtagaaaaatctataaagatgtggtataatacttttgattgtgagagacaaatcgggatttggaggtaatatgcttatgaaaaaatttctttctttgtttttatgtcttacttgtgtgctgactttagttgcgtgtggaaaaaaggtagttcctattacgttacctcaaaccgacgagattacatctattgatataacttttggggaaaatacagtaagtcattcagacaaaacttggataagtgaaataatcgccgatatttccagttctgaaccgactaagaaggaaagtgttcaagactgtccacaagtggaaagttatatcaaaattgacttccagtttgagacaggaacaagtactatctttgcgtatgaggatagtggtaaatactatattgaacagccttatcaaggaatttataaaattgatagccaactattcgaaagattacaagaaactgattaattccagtttgtcgaactgaatatagcttacatagccgtttggttttcaaaagaaatcaggcggctgtttctattttgaaggaggtgttcgctatgaacgaaacagattacaacgctcgcctttatgagaaaatgaaagccgagcaggacaaacaccgggactggctgctgcatcaagagccgcccgaaatcctcaatcatacctacgaatcgtatcttcaaaaagtacaagtaaaaatatgttaccttacatattggtaaccccgcaatacggcgagcggtaaaacactcctcaagtatttcctttaaatacttgaggagatgtttttctcaaaagctatagatttcggaaaactataaattgcagtctttttaaaaatcattttgccaatagacagaaatagcgtaagtaaagcatttagctatttctgtgaaatactctactattccaacggtaaaagcaatcgtgcaaaagctacataccccaaaaaggatgatcggaatgaacgaaagccctttttttagttttcggaaatatctgataataacgcgaaaacttatagtaaatataactaaacctaatactaaaataactactccggcacaaaaatataagttcccctcgcttccaaggctaacacctattcctttactagttccggtgaccagtacaacccctatggaaaaccaagctggggatattactccaagaattgcgatccatattagagcgatcaaagttagaaatcctcgtttcgagaaagtccacatagaaaaaccttcttttttcatatttttgtattttatggttgcagtatattgtcattctttctctttattacttaaacgggtgatgataatggagaaaaaacggcaaaagatgtgggcggcatcggcaatgctgacggtaaacgcgccccgtgccttgatgttctgtgcggtcttgtgtgtctcggtgaggttcagaacaacggtgtcccgctcctgcatggtgccccatgcggcgttcatcacattcacgctgccgtcctcgttataagtcgcaaccatcagaaccggcatagggaaaatgccctcggtaattttcagatttgttctcatgataactcctccttgtgatcatattgggaatgttaagataattgttgctttgagagcaattctaattaacaaattaccatttgtcaacttgccctttgagagaggaaaaatccttttctcaaagggcttttctatttatacggatattcgcaaactacaagataaaaccaaaacttcatggatgactaccatttgcacgtcgggaattgctgctatcctatatgcgagtttgctgaaaaatgcaaatttataaaggtaaaacagtgtgaaaagattctgcggctttggctgcgggagcttttcgtttccgggtttgtcacggacagggcgggaaagcgggttcaaacacggcataccttttcgctataatagaaccaaagaataattctgttgagcaaaagggggacgcgtatgaaaaatgggaaacgggcggtaagctttattttggcggtggtgctgttgtgcacatcgtttgcaggatgcggcatggtgcagcaggacaaggcgtatttggagcaggtggcggcggccgtgacggagacgcagagcattttaaaggacgtggaagctgcggcggacgagctttccgggcagagcagcattgtgtatgagaattctgtgaatgcagagggctttgacgtgctggacgagtattatactttgtgcacggagaaactaaacgcgcttaacgacgcggtgggcgcggtgcggcggcagatgcagagcctcgagcgctgcgacgcgccgaagaccgaaaaaggcaaggctgtggaagcggagcagaaggcttactttgaggacgcacttgaggtgatcggcggcattcaggaggcgttgacattttacacggcgcagtatgacgctttgcagccgcttgtaacggctacggtcggcgaccgcagcgacgagcaggcatatctcatttccgtttacgaggcggcgggcaatgtgaaaacggcgctcagtacgctggacacgccggagtggctcaatgacctgtggccgaaatacgttgcgaaccttgatgtgatgacgaaatacatggaatcgcgctcgtggggccttgcatggtcggacgttttgagactgtattccgcaaaccagcttatctcgcgcgtgggcattacttccgggcggcacgaggagacgatgttcgatttatacagccgcgaatataaccacgccgcgtttttgctcgatgagaacctcggcgcgtatgcggatgagattctggcggcctgcgagggcggcaaagatgttggcgcgtatgacgcgcaggcgccgatcgtgttctcggactactcgaccgtggaggagatttttccgaatttgtacccctcgatggactcggcgatcaacctgcttttatatacggacaagggcaacaccgacgtgatggtgacggcggaaattgcgggctttacgcagaaatatgagcagaaagtgacactgacgccggagatgacgtatttgatgatcaagccgccggtgctcgccgatatgcccgacctttcaacgacgaaggacacgcagatgacgctgcgtgtggaaaacacgatcacgggcgaggcgattattcaggagacgaagaacattgagctgcacagcgtatacgattataaaaattacagcgatgaattcggcatcatccagaacgacaacatcttggcgtggatgacgccggaaacggacggcattttgcaggtgcgccgtaatgcggtatcgtggctggagcaaagcttcggcacggaatacggtatgctgccggggtatcagccggcgtacggctttacgtccgaccaaggcgcgtacatcacgtattatcaggtggcggcgatacagagcgccatcagcaacatgggcgtacgctacaacatggggccgtattcgttcagtgcgagccagcgcgttttgatgcccgacgcagttttagagaacggctccggaatttgcatcgaaacagcggttttaatggcgagcgtgctggaatccgcaagcatgcacgcgatgattgtgttcacgccgggacacgcgcagacagcggtggaaacgtggagcggctccgggcaatacttcctcattgagacgacgatgctgccgtttacggcgacgcaggacgcgctgcagtcgctcattcagccactgagcgcggaggaatgggcgaactacttgtacaacaaggagcaggaggcgcagcaatccggcggcatggtgtatgtggtggattgcgatttggcgccggtgctgaacattcagggattaaactactgaggagacaaacatgacacgaacgaaacgaatgaccgtggctgtgctgacgcttgtattgcttttgaattttgcgggctgcagcgcgaaaaacgcgctgtttgaccgagtgagcggcacgggaaaatttgcggcggaaagcctgacgatttacgaagaaaaaggaagctttgcggcggaaccgaaaacggtgcgggacgcaaagcaagtggaagaaatttttggcgcgttgaaagatgtgacgctcggcgaagttgtaaagacggacgacaaatacacgcggtatatttttacatttgcggacgcaagcggcagcaaaatgagctttacgctgcgtgaggacgggtgtgttgtattaggcggcaagacatatgatgcgctcggcacggacacggtgtttgaggcagcggggatagacccggacgaggggacggcggaatcaaaaacggaagcgttctccgaagcttcaaatgcgcagacggagcctgaaatgacgcccgatccggaagtgaccgtgaccccggagccgacggcggaaccgacacctgaagcgacgtacacgttggttgattacgacggcggggtgttcacgatgcagctgccgcaggggtggcagattatgaccggaggcgaatacgcgggctattccatccgcgcgtgggacccgaatgacccggatgtgcagatcttctattacggtgagcttggcccgtactttaagagtgcggaagcgaaggcgcagtatcaatcgatgagcacgagcaatgacccgctgacatatttgccggtgctggaggacccgacgcttgcggggtgcttaaacgcgatggacgattaccaagacgcttacgacggcatcatgccccagagctttgcgtttgcaaaaattcaaaacatgacagttttgagcgaaacgcccattacgacgccgcttgcaagctatgcggtttcggaagcttcgatcttagcgagcctcacatcggaaacaggggcggcctgcacgggtatgtttgagggcagcattttagatgcgggcggctatgaaatcaacggtgtggacgtgacgccttcacgcagtgcctcgaacattttcggcatcattgcgccggagggaaaatttgagacggtggcgccgatcttgatacagtctttgacgagctttacgtttacggacgagtacattcaggaagcgatacggcaaggaaacatgcaggcggaaaacgcggccgaggtttcgcgccggaataacgaaatgatggagcgcgttgtgaatgatttttgcgaatatattcggcaataaacggcgattagcgccgcgaacgctgcaaaacttttaaccaacgttgacgcgggtggcggttaatcctcaacgtaaggcaagatcatgttttggaaggcgctgagcattttactgtggcgaatgacgaaatggatggcgggggctttgcttttggacagcatgacccactcgttttcgtggatttgaatttggatattgcggaacgcgggtttctccgcaaaacggacggtgtagtttgggtgctgttcagcgaatattttggtggctttaaggtgcgctgtgtattcttcataggtgtacgtgacggtgttttcgatgaatgcgtttgaaagcgagagcgtgagggggcttgcccggaacgcttcttcgcttacatgcgggagctcgtcgatgacggtgtttgcagtgagaatttgctcgatattttccgtttgctgtttgagtgtggcgttgatgctttctgcgtctgctgccgacatgccgctgcgctttagaatgcgtccgagcagatcttccggcatggtataaagcggcggagcggagagaatgttttgccgtgcgccgacggtggctgcgtcgtttttgaggaatgcgcggaacagatcggcctgtggggctttataaatttccattaagggctgcgctttttgcagcaggtggtctgcgatgcggcggctgtgctgcacctcttcacggttattcgtgaaatggtaatggccgtcttcgtgaaagccgtttatgcactcgccggtgagcgcggcggcgccggagacgtaatgaaagtggcagtagacggtgttctgcacgccttttaagtagtacggcgagacctgccccgtcatgtaaatggggatccagctctctaacccgagcatcatttcttcaaacgggcggtctatgttgtggattatatcgagatgcagtccttttcggagcgcgacggcgatgccgaacatccattttttaccgaagtcgagatcttccgccatatcggccatgggcatatcgctgcacatgaaaacgggggcggcggatttggaaagcgcggtcgccttgaaaaaatcgagctcgccctgcttcatttcctctatgccgtagtaattgcgcgaggcagggaatcggaacgggagcgaaggcaccttaatctccccaaaatgaatggcttcgatatattcattgaggtcgaaggtatcgagatgcgcgagaaatttggagacggactcggcatcgcgctgctttgcggtgcacagccactccatgaggagcgcagtgtattgctcgggctttgcaggttgctctgcgggtgtaccgacgagcgcgcagagggcttctttttggtcgcttttcaggcaccgccttgtgacatagcggcagacctgcgtgatgaattcctctgtgtttgcgggttttctctgtccggagcagacgcgggagaggtaggatgcgtcgaaattcatggcgcgggaaagctctgcgtagctgatgccgaatgcggtgagcaggtttttgaggttttgaacggcgctgtcaaaatcggatttttcggtgtgcagggaagcgcggagggcgcagagaacttcgtcctccgaaaagccgggagaataatcgtgttcggcggcgatggcgcagatgccctgtgcgagccgcagaagctgttcgctgtccctgccgggttcgcgctcgccggagcggtagcggctgatggcggcatccgatatgccggaggcggcggaaagcgttttggcggagcagccgagtgtttcgatatataaattgagacggtcacaaaatttcatgcgggttccctccgtatgcttgatttaaaacgattataccacgcttcgaccgaaaccgccataagcgaacgcagtggggtttgacattttccggtgtgtcaatgaccaaaccgggaaaacgcttttttcggttacggtcgtttggtatgataggggatagaaaagggggcgggaaaatgaagcgatgcggttttattttgctgtgtgcgctggtcgttttgtgcgtgctgcttgcgggctgcgaaagaaagacggcggaaagaagcgaagccggcgaggtgtttacgttttgcggcggcgaagcagaaaatttcgcaaagatatttgacgtgaatgagatgaactgcatggaatatcgctacacgatggacacgcccgtttcctgccgcatcacggacaaggcggcgatgcaaacgatttttgacgcactttgcgaggtgaaaatcggcgaaagaacggacatgcgtgcaacggacagcgagcagagtttgacgtttgtgaaaacagacggcacgacgtgtgtgatacggtttgagcagcggaacctgctgcatgaagaagacgcttatcaactggaaaatgatgcggcgctttggaaggcgctgcgcgaagcgaaatagaagcgaaatagaaatgggggaacgacatgaaagagtcgagagtatttgagctgaaccaagtgactgcagagcaggttttggaggctgtgacgacgtttttgcgcggcgaaaagggcatggaggtgcagagcgtggcgacgccgaacgggtacctcattcaggcggcgcaggccgatacgctgcgcacgctttccggcatgaagctggcgacgacggtggagctcacggtaaacggcacgcagctcaatgtgacgctcggcgagggccagtgggcggacaagctgggcgcgggcgccgtggggctttttctgctgtggccgctggcggtaacggcgggcatcggtgcgtataagcagaaaaagctgccgagcgagatttttgaggtggtgtaccgctgcacgatgggcgagccaacgagcttccggacggcgggcgtacccgtaaatgcggcgccgacagctccggcgggggcagtctgtccgcagtgcggggcgcagattttcgcaaacgcgaggttttgcagcgcttgcggcgcaaagctacaaacggtgtgtccgggctgcggcgcgccggtaaagccgggcagtaaattctgctcggaatgcgggcaggcgctctcctgatttatatatcccaaaacggcggcgtggagcttaggctttgtgccgccgttttttatgcgcatgttttgtaccgtgtggagtgaaacggttgaaatcttcggtgaattcttgtatgataagggaaaagaaaggcggggatgaagatgaatatcacggtttatctcggtgcaaacgcaggcaatgaccccaagctgcaagaggcggtggaggcgctcggcaagtggatcggcgaaaacgggcatgacctcatttatggcggctcaaaatgcgggctaatggggtcgatcgccgaaagcgtgctgcaaaacggcggcaaagtgaccggcgtggagccgcagttttttgtggactccgagctgcagcacgacgggctgacggagcttattgtgacaaaggacatgacggacagaaagacgaaaatgattgagctcggcgacgcgtttatcgcgttcccgggcggcacgggcacgctggaggaaattgcggaagtgatgtcgaaggtatcgctgaagcatttagacgcgccgtgcattctttataatctgaacggatattacgacgggctgaaggcgcttttaggccatatgatcgagatggggctttcgaccaaggagcggcaagagggcatttattttgccgacacattagatgagatcgaacgtattttagcggaaaagtgagagatatacatgccgaacattgcatggaacgcgaaggagtatcagcagaatttttcgtttgtgccgtcttacggcgaagcggtgacagagcttatcacgaagccgcagtgagcgaaaaagcgacacctgacggtttccgggcttgtgcggtgggggttcgtccgctataataaaagcagaacgagcgcaaaggagtgctgctttatggcaaagacgaataagacaccgaaggcggaggacaacgccgagctgcggacgatctcgcttttgaaaattctgaacacatacagcgacgaaaaccacgagctttctacaaaaaacattatggataagctccaaaaggaatgcggcgttacggtgcaccgcacgaccgtcggcaagaacatcaagcagcttgcggactgcggctttgatatttacacgcacaagacgacgcagaaccgctattaccttgcgagccgcttatttgagatgccggaattgaagttgcttgcggacgcggtggaatctgcgggattcatcaccgaaaagaaaagcgaggagctgattgaaaagctttgccggctgacgagcgtttatgaggccgaggctttgcaggagggattttgcgcgaacaacgggaaatcctgcaacgagagcatttactacattgcggacacaatcaacgcggctattgcgaagcggaagaaaattgcgttttactattttcattacggtccgggcaagaaccgtgtgctgaaaaacgacgggaagccgtatgttttcagcccatataagcttgtttggaatacagatgaatattacgttgtggggtattccgacaagcacgaaaagcttgtgagcttccgcgtggaccgcattgaccgttgcccggagattttagatgaggacgcggagccgcggcccgaaaaagaggagttgatgcggcatatccgcacgatgacaagcatgtatgacagccgccgtgagcgcgtgacgcttttgtgtgacaacgcgatgatgaatgcggtggtggacgcattcggcgaagatgtggaaacaaaggcctttggcgacgatgcgtttaccgtggaaacggagacggcggcaagccctgtcttttaccgctgggtgttcggctacggtgggaaaatccgaatcacggagccggaaaacgtgaaaaaggagtatgccgaaatggtgaaaagcgcttttggaaatacgtgcggccggtgcggcgcgtaaagtaaacagcagtccgacctttggcagtttggtgcacaaaggtcgggcctttttttgtgttgaagacggaacatgaatgtgctataatgaaccgtaagattttgggaaagggtccggcaatgtataactctaaacgattcgaaacggtgaagaatatgagggaaaacaagaaaatatcgaatgccgtgcaggcgtccatcggcgtgctggccgtggttttggcggcgctgatcgtttggatgatggtgctggtctcgggcattcagggcacggcgcgcgtggtgaactatgcgggccttgtgcgcggcgaaacgcaacgccttgtcaaaatggagattgcgggtcaagcggaggacgggatgatggagagcgtggaatcgttcatcaacggtctgcgcttcggcgatgacgagcttacccttgtgcgattggacgacaagagttttcaaacgaaaatggaagagttggcttcttgctttgaaagcctgaagcaggagatttatcttgtgcgcgaaaagggttttgagaaaaccgacatcatcgacaaaagcgaaaagtttttcgacatttgcgatgaggcgacgggccttgcggaaacctattcgcaaaagcgcgcgtcctctttggcggttttggagcggtacatcacggcggacatcgtagttttgatgatgctgatcggttatgagtttatcaaggcgctgcactacgccgccatgaaccacgctttgcagaaaaaggtgtacatggacgaagcgacggggctgccgaacaaaaataaatgtgaggagctattgagcgcgccggagatgatcacgatgcccgtgggcgtttgcagctttgacctcaacaatttgagacgcatcaacaacagcatgggccacgaaaagggcgacgcgtacatccgcatttttgcggagctggtgcgcgaggcggtgccggcgcattactttgtgggtcgcgcgggcggcgacgaattcatcgccattatggacggcgcggacaaggaagaaatgcagcggtgcttacagctcatccgcgaccgtgtggacacgtacaatacggcgaaccccgattttccggtgagctacgcggttggcatttcggtctccgacgagaacgaaaactgcacgatgcgcgatttgtatatcttcgcagacaaaaatatgtatatcaacaaaaaccacgtgaagcgcgaggaagcattggccgaaaagaagctggatcgcaggctgctgaaaagcatgaaaaaatacggcagcaacttttccgattgcctgtactgcgacgcaaggcaggacgcttaccgggtgattcgtgcaagcgaggcgtttttccttgcggcggacggcagttattccggcgcggtggagcagattgcagaagaacgcgtggcgcaggaagaccgcaaggcggtgcgcagcaaattacagctgacggcgctgtgcgaggcgctttccgaaaagaaccgcgtggtggaattgcagcacaagattttcggcgagaacagtgccgactatgggcgactgacggcgatttttgtggatgcagacccggacggcacgctgcaccatttcttgctggcgtttgagacgatcgacagtgtgcagccggagacggacgccaagcagcaactgacgcagtattacgagcagttgaagcagtctattttggaaaacgacagttacgtggatgcgatgctggagactgcggatgcggtatactccgtgaatctgacggatgatctggtggagcgtgatttccgtcgtgaacgcggcgcagacatctttattgaggacttgaaagcaccgtgtccgtacggcgaatactgtcaccgtcattctgtgctgattttgcccgaaacgatgggcagctaccggttggttgacacggccgaaaagcttttggaacgctatgcgagcggagaaaagcaggtgacggtggaatactgtgagcgcgtatccggcagcgagacacgctggatacagaaaacggcgctgatgatgtcttcacgcgtatacgatgcgaagagcggtgaggaaaagccgatgatccacagccttgtgctgctgaaaaacaccacggagttccatgcacaggagcagaaggagcacgagcgcttgcgggctgaggtggacgaagcaacgctggctaataaggcgaagacggagttcctttcccgcatgagccacgatatccgcacgccgatcaacggtgtgatgggtatgctggagattatcaagaaaaatcgtgaagatcatgagcgcgtggacgactgccttgaaaagatccatgtttcctccgagcatctgctgtcgctcatcaacgatgttttggatatgagcaagctggaatccggccacatggagccggagcatgtgccgtttgaccttgacgatttgatgaagaacgtccgcgcactgaacgaagcgcaggtggcaaaaacgagtattgtgtatacctacagcaagatttcgtttgcgcacgcaaagcttatcggcagcccgctgcatctgcggcagatcttattgaatctgttcagcaacgcggcaaaatacaataaagaaaacggcacgattgaaacgcatgcggaggagattgcctgtgacgaaaacacggcgacattccgttttacaatacgtgatacgggcatcggtatgagcgaagattttgtgaacaacgagctttttgagccgtttacacaggaaaagcaggacgcccgcacgcagtatcagggcacgggcctcggcatgtctatcgtgaaggagcttatcgagaagatgaacggcaccatcacggtggaaagcgtgctcagcgaaggctctgcgtttacggtgacgctgccgtttgaaatcgacaagcatccctctgcgcaggcggcggcgaatggcgcggcggacgaaacggctctgcacgggctgaaagtgctgctggccgaagacaacgaactcaacatggagattgcggaattcttcctggaagacatgggtgccgaaacgatgcaggcgtggaacggcaaagaggccgtggaggccttccgaaactccgcgccgggcgagatcggcgtgatcttaatggacatcatgatgccggtgatggacggccttgaggcggtgcagcgcattcgtgcactggaccggccggatgcgaaaacggtgccgatcattgcgatgacagcgaacgcgttttcggaagatgtggagcgcagccgcaaagccggtatgacggagcatctctcgaagccgctgaatgccgaaacgctgaaaaaagcgatcttacggaacatataacccgtgcggtaaagacaagtattcgttaagggcggcgaagagccgcccttttttcgtgtaccgacacttgatttttctttttgttgtggtatactcatttgggagtattagaatcaattctaaaacagggaaaagaggggtataaatggcaaaccgcaacgaaaaggaggcctcgcgcaagcgaattctttctacctgtgtgcgtctgtttttggagcaggggtttaagcatacgccgccgaagcagattttgacggaagcggatgtttccgcgggcacgttctataatttgtaccgcacgaaagccggtgtgctcaccgagctgaccgagttcatgtttcaaaatcagtttactattgcggggcagattgcacagggggagacagaccccgtaaagctctacgcggtggagacggcgattcagctgacgctggcagagctgaacgagaacctgcgccaaatttacgtggaggcgtacacgctgccggaaaatttggaaatcatccataggatgacggccgagatgctgcaccgtattttcggcgcgtatatgcccgggtacagtgtgagcgatttttatgagtcggacatcggttcggcggcgattatgcgcggatatatggcgcgtccgtgcgacgtgtattttacgctggaacgcaagttagagcgctttttgcagctgacactgcgcatttattgcgtgccggaggaaaagcagcgggaggttatggcactgattgcgagcctcgacatccgtgccattgcaaacgaagtgatgcaaaagctgtttgccgcgcttgagatgcactatgaattcacgctcggcgaagaggcaaagcaaatttgatttaaaaaagagccgcacagacggatatgcacccggtcttctgggcacaggttcaaaattgaaaaacggatttccatcaaggatgcttccctgaatgcagaggaaagcgcaaatatttgttgagtgtgctgtcgaaattcattgaaaacagtaaaattctgtgctaaacttagagcataaacaccgggcggaatataacgtgcggaaaccattgaaaaggagcaattatttatgggtcttattaaggcagctgtcggcgccgcgggcggtgttatggcggatcagtggaaagaatttttctattgcgaatcgatgccgaaagaggtgcttgtcacaaagggtgtaaagcgcacgagcgggcgttcctccaatacgcgcggcagtgacaacatcatcacgagcggctccggcattgcggtggcagacggccagtgcatgatgatcgtggagcagggcagagtggtggagctttgcgcggaaccgggtgaattcacctatgacgctttgagcgagccttctgttttctccggttctctcagtgcgggcattaaaaacacctttgcgcagattggcaagcgttttacgtatggcggcgatgccggcaaagatcagcgcgtatattattttaatacaaaggaactcatcgacaataaattcggcacaccgaatcccattccgttccgtgtggtcgataacaagatcgggctggatgtggacgtttccgtccgctgctccggcgtatattcgtaccgcattgcggacccgcttttgttctacacgaatgtgtgcggcaatgtggagcaggaatatacccgcgacgaattggacagccagctgaagcacgagttcatcagcgctttgcagccggcgttcggcaagctttccgacctcggtttgcgtccgaaccagattgtggcacacaacacggagctggaagacgccatgaatacggcgctttccgcgaaatggggcgagctgcgcggcttgacggtcgtcagcattgcgcttggctccgtgacactgccggacgaggacgccgagatgatcaagcaggcacagcgcacggcgatgatgcgcgacccgactatggcggcggccacgctcgtcggcgcacagtcggacgcgatgaaaacggccgcgggcaactctgccggtgctatgaacggctttatgggcgtaaatatggctatgaatgcgggcggcatgaacgcacaggcgctgtacggcatgggtcagcagcaggcggcgcaggctgcggacagctggaagtgcgcgtgcggcacggtggtcaacggcaatttctgcccgaactgcggggcaaagaagccggataacgacggctggacctgctcctgcggtaaagtgaacaagggcaatttctgtgcaaactgcggcgcgaaaaagccggagggcttaccgaagtaccgctgtgacaagtgcggctgggagccggaagaccccgcgcacccgccgaagttctgcccgcagtgcggcgacccgtttgatgaaaatgaccgtgcctaaaggttgcgacctgcgttgaactgtgaggagatgagagcaaatggcggcaattaaagaatacaaatgtccttgctgcggcggcgctgtggaatttgacagtaaaattcagaagataaagtgtccgtactgcgacacggagtttgacaccgaagcgtttaccgcgcacgaggaagaagtacaaaacgcaaagcccgacgaaatggactgggagacaacggccggcggcgcgtgggagcagggcgaagaaagcacgctgcgcagttacgtgtgcaactcctgcggcggagagatcgtctgtgatgaaaacacggcggcgacctcctgcccgtactgcggcaacccggtcgtgatgatggggcaggtgagcggcgctttgaagcccgattacgtgattccgttcaagatcgacaaaaaggcggcaaaggaagccttgcagcggcattataagggcaaaaagctgctgccgaagattttcaaaaaagagaaccatatcgatgagatcaagggcgtttacgtgccgttttggttgtttgatgccgatgccgatgcggatattcgctataaagcgacgcgtgtgcgcacctggagcgacagcgattacgattacacggaaacaagctactactcgataggccgcagcggtgatattggctttgaccgcgtgccggtgggcggttcctccaagatgccggacgatttgatggaatccattgagccgttcaagtttgaggacgcggtggattttaaaacggcgtatcttgcgggctaccttgcggacaagtacgatgtgacggccgagcagagcatcgaccgcgccaacgagcgcatcaagcgctccacggaagacgcattcgcttccacggtgaaggggtatcactccgtcacgacggagaattcctccattcgtctgcacaacggcaaggcaaagtacgcgctttaccccgtgtggcttttgaacacgacgtggaagggcaaaaagtacctctttgcgatgaatgggcagaccggcaaattcgtcggcgacctgccggtggataacgggctgtactttaagtggcttggcgggcttacggcaggcttcggcgtgattgcgctgattgcctatttcctgttttggctgttctaagggggtgcggagaatgaataaaaagcttttatcggtatttttcgccgttcttttatgtgtagttgtgtctgttccggtgtttgccgatacggcggaggactacacgccgcacctgatcgacaacgcggaccttttgacgggcgaggaagaaagtaatctgctcgcgaagcttgatgagatcagcgaccggctgagcgtggacgttgccgttgtgacggaagactccatcggcgacaagacaccgcgtgaatatgcggacgatttttacgattataattcgtataagtataacccggacggcgttctgctgctcatcagcatggaagagcgcgactggtacataacgacgacgggcagcgccattacggccattacggatgcgcggcgcggcaatatggaggatgcgtttttgagcgacctcagcggcggctactattatgacgcgttttcaacgtatgccgatatgtgcgacaactacatctcgggcgtgcagagcggttactacgaggaaggtgaggcgtacgaggagagcaccgtgggggatttcccgtggggcccggcgattttggtttcgcttgctatcggcctcgtcgcggcgcttgttgtgacgggctttatgcgcgggcagctcaaaaccgtgcgccgtaaggcggccgcgtcggattatgtgcgccccggcagcatgaacgtggcgtatgcaaacgacgtgttcctctactcgcacgtgaaccgcacggcaaagccgaaggacaacgattcttccggcggctccgcaacgcacacgtcgtcctccggcacaacccacggcggtggcggcggaaagttctaaaatttaacgtaaaaatgccgaaattccgcgaattttacggggtttcgacattgacttttttgaaaaacgtgatatactcaaaaatccactataaaaacggaggtgtatgtcatgaagaaagttattttgaaaacggaacgtttggtgctgcgcgaatttgtgccggaggattttgaagcgctgtacgcgattttatccgacgcggagacgatgcggcattacccgaagccgttcgacgaagcgaaggtgcgcgggtggatcgagtggaacctcgaaaattaccgcaaatacgggttcgggctgtgggcgatggagctgaaagaaaccggcgagttcctcggcgactgcggcatcacgatgcagacgatcgacggcgagcagctgccggagatcggctaccatgtgaagaagacgtattggcggcgcgggctcggcaaggaggctgcccgtgcggtgcgcgattggttctttgcaaacatgaagtacgacgcggtgtattcttacatgaaatacacgaatgaggcttctgccgccacggcgcgcgcgaacggcatgacgaagatcgccgaatggaataatccgaacgacaaggtttcttacacgtaccgcatcacgcgcggagagtgggaagcgcttagaacgtaaatcgtttcagaaatgccggaattgcatggtgccttatgcgatttcggcattagacttttctgcggaaacgttctatactgaagttaaagtgaaaactaaattttaaatggaggtatgtaagatgaaaaaactggttgcttatttttctgcgagcggcgtgacgaagaagacggcggagacgctggcggaggccatcggcgcggatctgtttgagatcaagcccgctgtgccgtacacgagagcggaccttgactggacggataagcagagccgcagcacaaaagagatgaacgacccggcttcccgcccggtggtagccgagacgctggacaccatggcacagtatgacaccgtgtttgtcggtttcccgatttggtggtatgtggcgccgacaatcatcgatacgttccttgagcagtacgattttgccggcaagacgatgattccatttgcgacctccggcggcagcggtatgggcaaaacgcttgacggccttaaaaccgtgtgcccgaacgcggactggaaagagggcaaggtcgtgaacggcatggacaaaaaggcgcttgccgagtgggccaatgcgttttaaaccatagctaaaccgtataaatccatagaaattaaatccgcattttcgtaaaaaccgggaatgcggatttttaattcttgttgtgaataataacgcaaaatttaagaaagaagaaaggaaaataggttgatttttggctgaacttcgtatatgattaaaatagaaacagtatatacggtacgttctgtacggcgtatacatatagtaataggaggccctatatgaaaaaacgtatattaggcatcgctttggcaatctgcatgatgattttctgcgtgccgatgggcgtgtttgcagcagaagctccgtccttcagcggcggaacaggcacacagggagacccgtggctgattgcttcgcaagcggatttgactgctttggcagagttcctgaactccggtaatgcagcaacgtttgatactgagaacgcaggtgttggaaactgccatggctattacttcaagcaaacggctgatattgacctgaccggggtgacgtgggaaccgattggttattccggaaagtactattttgcgggaaactatgatggtggcgggcacagcatcacaaatgcggtttctaccggaaaagttgacccggacggttacgctacggctggcatttttggttgggccgcttttggctcggtggaaaatctccatgtaaaaaacgcaaactttgtggcaaccggtcagaataattacagctatgtgggcggtattgcaggtgtgtgttatggttcatccatcaaaaactgctcggttgagaactcctctctggagagcagacgcaacaacaataataactgtgcgggaagcattgtgggttattccaccggcggaacatttgaaaagtgcgctgccgaaaacaaccaaattagaactatggcttacggcggtggttttgtcggtgaagtggacgatgaccctaactatggagccggcaattctacatttacaaactgctatgttgcaaactgtactgtgatttctgaaactgatgatagtcagggaacaagtttttcgggcggttttgctggagagattacggattcaacattgaccattcaaaattgctatgtgtatctggcgacgctttctaccgtgggaaatgctgtgccccagggaaccggcgtttttgcgggcaacctgtgggggagcagtacgattgctgatacaaactgcttcttcggagcgtgcggaataacagaaaacgcaggtacagccggtgaaaagacagaagaagattttacaaatggtaccgtagcaggtttgctgggcgatgcgtttgcgcaggcacgcaattatccgaggtttaaggataacccggcagattacagtgcagtagacgcagccattgccaaggcaaatgctttggaaaaagataactacaaggacttttctgctgtggaagcggcgattaacacagttgtgcgcgacaagaacataacggaacaaggcgaggtagacgcaatggcgcaggctattgaaaatgccatcaccgcgttacagtacaaagatgccgactacacgaaagtggacgaggccattgcgaaggcaaatgcgctgaatagagacgcgtatacagacttcaccgcagtggaaacggcgattaacgcagttgtgcgcgacaagaacataacggaacaagacgaggtagacgcaatggcgaaggccattgaagatgctatggctgcgttggtagaaaagcccacagaggctccgaccgcgacgcctacggcaacacctacggctgcgccttctgcaagcccgacggcggttccgaccgcgacaccgacggcaacacccacggctgcaccttctgcaagcccgacggcggctccgaccgcgacgcctacggtaaaaccgacggcaacacccacggctgcgccttctgcgagcccgacggcggttccgaccgtgacgcccacggctgcgccttctgcaagcccgacggcggctccgaccgcgacacctacggtaaaaccgacggctacgccaactccggcgccgaaggcagaccccaataacccgaagacaggcagcagcaacttgccggtcgttttcggcagcgcggcgctcgtgctgagcggaggcgcgcttgcagcggtgctcatctataaaaagaagagacacgaaaagtaaagtgaaaacctaaaagtaatgaacccccgccccggaaatcggctttgtgccggtacccggggcgggggttttacattcttattcaaaaaatatttacgatttacacgacaccgtggttgacacccgtacggacccgtgctaaaataaaatacgaattcgtattttagcgaggtggagcgaaatggagcgatatgcgtttttccgtcagcttggcaaggcggtgtacggcatagatgcagcttacggcgtgttctcgaaaaatgcgcagatcaaaccgaatatgctgtggctgctttcggcgctgaacgacggcgaggggcacacgcaaaagcagatctgctgggactggggattcccgaaaacgacggtgaacacgcttatcaaagagctggaaaagggcggctttgtggtgcagagccccattcccggcgagcgcagggagctttccgtaatgctgacagaagcgggcagagactacgcgaatgaggttttaaagcccgtgtatgaggcagaggagcggctttttcggctgtattttaaagataaagacccggaatttgtacaggagctgttccgtttttccggtgtgatgcaccgctattttacaacaggggaatttgaagaaacggggagcgagacatgaaaaaattaagctggcatgaactgaagccgcaggtgaaggaagtttgggtactgagcctgccggctattttaacgcagatcacaaccatcgtgatgcagtatatcgattccgccatggtgggttcgctcggcgcgaacgcttcggcggcgatcggtctggtatccacgagcacatggctgctgggcggcattacatacgccgtttcggcgggcttttccgtgcaggtggcgcataacatcggcgcgggacgcgatgcggaagcgagaagcgtggtgcgtcacggcctgtgcacggcgctgtgcgtggcagggattttgtgcgcgttggggctttccatccacagtatgctgccgacgtggctcggcggcgacccggctattcgttacgatgcctcgaaatacttcatggtgtacgcgttgatgatcccgttctcgcagatcaactcgctgaactcgtcgtacttgcagtgcagcggcgatatgctgacgccgagcattttaaacgccgccatgtgtttactcgatgtggtgttcaataccattttcattccgcatttcggcgtgatgggtgcgggcatcggcacggcgagtgcgtgtgcggttatcagcctgacgatggcgtggcgctgcctgttgtgcaacccgcatttgcggctcaaccgcaaagagaccgaaaagcacggctttgacccggaaattctcaaaaaagctttgaaaatcggtctgccggtcggcgtgcaggagatcgccatgtgcagcgcgcaggtcgtcgcgaccatgatcattgcgccgctcggtgcagtctccatcgcggcaaactccttcgccgtgacggcagagagcttgtgctacatgccgggctacggtatcggctcggcggcgacgacgctcgtcgggcgcaacatcggcgcgggaaagaccgaccttgccaagcgctacggcaacatctgcatcgtgatgggcgcgggctttatggcgataacgggacttttgatgatgttcctgtgcccgtttgtattcagcattttgacgcctgatctctccgttcgcgcgcttgcggcgcaggcgttgcgcatcgggttgctggctgaaccgctgtacggcgtttccatcgttgcggcgggcgcactgcgcggcaccggcgataccttcgtgccgagtatgatgaacctcggcagtatttgggtggtgcgcatcgggcttgccctgctgctcgtcggcaatttcggtttgccgggcatgtggacggccatggcgacggagctttgcgtgcgtggccttttgatgctgtaccgtcagaaaacaacaaaatattataaaaaatataataaaacaactgaaacgagcgagcctgagctgttagaagctgcggaaagctgaaaagcgctgcgaaaggacgctcaatacggaaaatacggagcatacggtaacggcgccgcacagggtaaattatctctgtgcggcgccgttttgcttgtgattcaaattttaaagctgtgggtagatctcctcaaagacggcgcgcagcagtgcaccggcatcgcggctttcggcggtgacggtgacaacggcatttttgtcgcgcatcaaaatgacgaactggccgtatttgccgtcggcgcggaaggaaccctcggggcctgcccagaagaggtagccgtaaccctcgctgccgttttcgacctgttttgaggtcgcttctttgacccactcggcggggatgagctgcttgccgttccattcgccgttttgcaacaataactgaccgaacaggtgcagttcgtcaatggtgaggaacagtccgcctgcaccgaaggtctgaccgttcgggtcattttcccatgtgggcagctgaatgcccatcggcgcgaacatgcgcggcatcaggtaatggacaaggtcgcagcccgcgcggcgctgcacgagaatgccggcaaggtacgggccgacgttgttgtacacgaatttttcgcccggcgcgtacacgaacggctgacgaagcgcaaggcgcacccagttgcggtcttcatagtacgggcgttcgccgcccattaaaaagctcttttcctgtccgagacacatggtgagcaaatcgcgcaccgtggcggcctttaagttatcggaaacgatttcgggcaggtcatccttgaatgcgtccgtgagcttttcgtcgatggagagcaggccctctttttgcgcaatgccgactgccatagacgtaaagcttttgcttgcggaatacacattgcggcggcaggtatcgtcccacagcttgcgggccagctgcgtgccgttttgcgagaccacaacgccgagtgcgcgaagcggcactgcacggctttcaaattcggtaagatcgatcatagtaaacgcctcctaaatgaaatcgagttggtgtaaagggaacgaattaagtctttggtcaaacaataccacaataaaaatgccgatgcaagtatttttggctaaaataagattttcggagaaaatttgaagtttttttaaaaaaagggttgacatattgcacttttgagcttataatgatgaagctgtttgagaaatgcgcttgtagctcagctggatagagtgactggctacgaaccagtaggtcaggggttcgagtcccttcaagcgcgccaaggaatccacaaagatttcggtctttgtggatttttttctgttttaagatggattttatcggttaaaagatttatgaagccgaatgtatttggtcgattcaacgaattacttttgtcttccgaccttgtgcgaaagaaatacgcatttttacttgccacatcctgcgtctgtgtgtataattagaaatattattctgcgtttttcgactttgcctgaaagaaaagtgaaaaacggcatcaaatttgagaaatgaaagttggaagatcatgttagagatcatagctgccgtaaacaaagcggtgaacgattttatctggggtgttccggccatggtctgcatcatcggcgtaggcttgcttttaagcttccgcacgcgctttttgcagatccgcaaattcccctatgccatgcgcaccacggcagggcgcatgttccgcaaaaaagatgcttcggacggttccatgacgccgtttcaggctgtatgcacggcgctggccggtacagtgggcacgggcaacattgccggtgtggcgggcgctattgcgataggcggcccgggtgcggtattttggatgtggtgttccgcactgctcggtatgtgcacaaagtttgcggaagttacgttggcggtgcattttcgtgagcgcagcaagaccggcgagtgggtcggcgggccgatgtattacattaaaaacggtctcggtaggcactggcaatttttggcggtgctgtattcgctgttcggtgcgctgacagtgtttggcaccggcaacgccacgcaggtgaacacgattgtaaccgctatcgatgcggcgctgacgcagtacaatgtgatcggcgcagaccacattcccacggcgaaccttatcatcggcattttatgcgcaatgctcgttgccatggtgctgctgggcggcatcaagcgcatcggcagtgtgagcgaaaagctcgtgccgtttatggcgcttttgtatgtgcttttggggcttggcgtagttgtcctgaacattacgcgtctgccggaggtactggcatcgatcgttgtcggcgcgtttaacccgaaggccttcacgggcggtgccatcggcagtctgttcatcagcatgcagcgcggcgtttcccgcggcattttctccaacgaggccggcctcggcacgggctctatcgcgcacgcctgcgccgatacgaaaaagcctgtaaagcagggggtgtttggtatttttgaggtgtttgtcgataccatcgtcatctgcacgctgacggcgcttgtcattttgtgcagcggcacggcggtgaattacggcaccatggcgggcgcagacctgacgatttccggctttacgacgacctacggcagttgggtttccattttctctgcggtcgcgctgtgctgcttcgcgttctcaaccatcatcggctggggcctttacggctcgcgttttgtggaatttctgttccgcaccagtaaggctgtgcgcccgttccttgtcatttattcgttcgtcgcaatcctcggcgcaaccgtcaaccttgacctgctgtggaatatcgccgatacttttaacggcctgatgagtattccgaatcttatcgcgttgttattgctttccggcacggtggtgaagctgacaaaggaattttttgcgaaagaagacgggcgtaagctcaaaaaataacagaaaaatagcagatagtatgcggaaaatcgccggggcaagtgcgctccggcgattttttgtatgtgaaaatgtcgtagaatcgcccgtgccatttggtgagtttgttagaaagttgcaaaatatggcagaaattgccgaaaaactatttaaatgttcaacgaattacgatatactcttgtcaagaagttcgttcggcgcagagaggggacggaaacatgaaaaaacggcgatatttcgcgggtactgcggcaattctctttttacttttgctttgcggatttgccccgcagagcatcacggaagacaaggatgcgcaggttttactgtatgaaacttatggtgaaagcgagatactggtctacaccggccgtacgacggtgctgtatcgcccggacggtcgttccgccgaagcaccgtttaacgggcaatatgccgttttgcatggcgataccgtgacggttttcgccgaaacggaggagttccttgccgtggagcgtttcagtgcggaaacattggaggaaacagacctgttcgctttgcctgtgacgagcggcctgcgctttgcggaaagcgacagcgcgggcaggctttatgctgttacttacggtgcgccgagcaccttgcaggtgtttgacgcggcgggcgagcccctaacggaattcatatttgaagataaaatattcggcatacagacggtggatagtacgctttatgtgctgctttcggaaagtgccgtgcagatttcacttgcgggaaatgtgccgatactttccggcacggcatttgcctatgcgccggctgcgcggccgtataagctgcttggcagcgacgtgtacgtcaacatgcagggcgaagtgcgcctgttttccggagaagagtgggcggaagacacgatcgtgacggaggccgttttgagcggcgacatgctctactggctttcggacacctcggaggtctcgcgcgtgcgccacggcgacaaggcggagttcttcacgctttccggcgaagcggctgcactcaccgcaaatgcagcgatcatctggcaaaacggcgcactgtgcagagagtcgttcggtacatttgtgcagcctacgcccacaccttcgcccatcccgacacctacgccggagccgaccgcgaccccaaagccctctaaaacgccgaagccgacggctaccccaaaaccgagcacgacgccgaagccaacggctacaccgaaaccgaccgccacgccggatccggatgtcacggcgaagttacgtgtttccggccacattttgtacgcagaaccgggtgttacggcagcaaagctacgggcagcgttcccacaggcggaagtggaagtgtacacgtcatcctccgcagcggcctccggcaggctgaaaaccggcatgagcgtgctgatcgacgacaagctgtatacggtcattgtgcccggcgacatcaacgcttccggcaccgtgaatacggccgatatgcgtcttttgcagcgtgtgctcgtcggggagacggaactgaccgacacagccgcgcttgccgccgacttaaatgaaaatggcaggcccgatgccgcagaccttgttctgctcgccgccaaaatgcagcgggactaaaccgcataaaatggagatgccatctcatcgacgcggacaggattgacatgcccggcgaagtaagctatcacgccgttgaaaactcgaagctttctaagccagacgtgatggagctactgcaatatcccatcggtgtgacacttgaagcagacggtcgataccgtgtatttctgggggcgtatcggttttggtatttgagggaatgcctgcactggacaaaaatcccgtgctatgtttacaaaatcaaacggcagatacgtgatcctcgtgaacggcgccgtcgggaaattcatcgcaggcagcaggcggaagaaagtccgcgtatccggctccaactctatgagaattactacaagctactgaaaggcatgaaggacgcaggtgaaatcaaaggcggtttacagacgcggctgatgcagcttctcggcgtttccgaacgcacggtgcgcatttataagcagctctcggaacagcttaccgggcgagaaaagcagcgcttaatgcgcggtaagttgccgtttgtgcaggcacgtgcccttgccgcagagagaaatcaaaaagcggcaatgttgccggattttgaagaagcagagagcagaaaagataaaaacctacccgccaacaatggtgagtaggtttttccattttaaaaagcggcaatattgccgcttttgctccgagaaatttgttgcagcgacttatttgcatttcgtgttattgaacttaatgagttttcatacgtgggcaataggaaacatacaggggtaatgaacttgttatgcaaatcttgaaaaatttcttgattttttcactgatcttgaatataataatatcaaatcaagatttactaaatctaaatttgtattacttggaggtgtgccgatgtttatcgggagagagacagaattaaaattcctgaatgataaatattcagagaatggcggtcaactcattgtgctgtacggcagacggcgtgtaggaaaaaccgagacgctgcgggaattctgtaagggaaagccccatgttttcttttcctgcacgcaaacgactgatccggtacagcttcgtaacttttctgctcggatgctgagagaagacattcctgcaaaaagctatattactgaatttaccgattgggaaagagcattccgtgcggtacgggagttaccatacggtgaccggaaaaagttgttggtgatcgatgaatttccgtatatgtgccgtggtaacaagagtattccctctattcttcaaaatctctgggatgcggagctgcgggatgccaacgtaatgattatcctttgcggcagtgccatgagctttatcgaaaaggaattgctggcagagaaaaacccactttacggcagggctacgggtatctacaagatgaaggaaatgggattttatgatgccgcaaagttctttccagattattctgaccgtgataaggtactggcttatgctgttcttggtggtatcccacattatctgcgccaatggaatcccgggctgtccattgacgagaacatcaagcgcaatattctgaccaaaggctgcatcctttacagcgaggtggagtttttgttgcatcaggagctgcgggaaacacctatctacaactctatcattgaagctgttgcgttgggcagtaccaagctcaacgacatcagtcaaaagtcgcttgtggaggatacttccaaaaccagtgtttacttgaaaaatctcatagagcttggaattgtggaacgggagttttccgtggatgctaagaccaaggaacaggcaaattccggtcgaggagcctatcgtctgacggataacttcttccgtttctggtatgcctttggttttgcaaatttttcacagcttgaggacggcgatgtggacggcgtatgcgagtatgttgtaaaaccggctctccacaagtttgcttcctttacttttgaggatatttgccgggaatttgttcgtgaaatgcagaagaaaaacgagctgcctttccgttatgcaaagatgggacgttggtttggaaagactacggtacgagacgagaaagcagcttccggactgcggacagcagagacggagattgacatactctgtattgaccgaggggcaaaggaatatctggtgggtgaatgtaaattcaaaggcgtaccgttttcctattctgagtactgtgacacggtggcaaagctttctccgctgaaagaaaaagccaagtttcactatgcactattttctgaaaacggatttgacaagaaaattatcgatcatgcggcagaaaacgaaacgcagctctatacccttaaccaaatcgttcattacgcataaaaagcagaggatagcaaaggtaaaacctacccgccgatagtggtgagtaggtttttctattttaaaaagcggcaatgttgccggtttattgctgtacgcttgaaagacggcacatttgctcgtagagggatgtgtgatccgggtggacgtaccggcggagcgtaaaggccgggttggagtggccaatgataagagcaaggctttttgcgtccgagccgttttcaatcattcgggtcgcgaaggtatggcgcagcatgtgcggcgatacgcggcgaattccggcgcactttgaagtgtacaggcaaatgtgccgtaagtgaccggcgcttaccggttctgcatcgccgaatatgtatcggttagagctgcagcgcttagcccagccttgcagatgtgtgagcataagggcgacttcgggaatcaccggcacgctgcgaatgccgttctttgttttgcttttttcaacgcgcagaaccttggcttttttatcccagtcctgccagcgcaggttttgcagctctccgcgccgcaggccggtcagaagaaaggtttgcagaatgaactgatctcgaatcgtgagttgctttgcagcttcttcaaacgcttgctgttcttcgcgcgagagcccgttgacgactttttccgaagcctttttggggacggtgacgccgctgatcgggttttctgtacactggtggtttttgattgcggtttgataggccaagttataaagcgacttgatatgccgtaaagatgattttgcgtatttctttgataggtcattcaaggctttttgaaacgtgaccggcagcaactctgtgagcagtgtgctttcgatttccgggaaacgccgcgatagtctttttcgggcatcccgatagatttcgagcgttttcggggcatattccggcacggcgtacacctcataccaaacatccagccattctccgatggtgcagacttttctttccattgtaaacttctcctgttagataaaaattcccgttagggttaattcagtttaacagtgaaaggaaagaaaaacaaaaaccggcaatgttgccggtttacgtttatgaaatgtttaactctggaatttcgatgaccttgcgggtaggggtcatggagatttgaaggtatttgggaaagtttttactattgccggttacggcaccggttgcttcaacagcggagataagacaaaagtggtttggcccactttccgtacccggataaattttgaagccgagtttatcgctcatttcggggtgtagtaaggcattgacatctgcaagcggatagaaagagcgtaagtctttttttgagtagatgcggtaataaacgaattgtatgtatccttcatcgtttcctgtgttgcggaagtttagtgttaggtcggcaacgaattcgggcagtgtatcatcaagagaataaaatgcggaaagctcaaggccataacgcgcagcgtaatccttcggagacatgaattcgatgttttcaagctttacagcatagccttttgtactttcatcggcagaaaactgaaaatcaccgtccaattcaacccattctcccatttggtatatttcggttttgggaggcgtgaactgcgggtctacatgagtatttacataccagatacgggtgctaagcctaacggcgacaagaagagagagggtaaaaattgcaatgcgtttcatgcagtttcctcctttatatggtgcgaagctaattttccttcttgaatatggtaaacttcatcagctaaggcattaaggacttcagaatcgtggcagcagagaatgatgagcgcgccacggtctttttctttttggataatttctttgaccatggcaacaccgtcaacatccaatgcgtttgtgggctcatctaataagataagctccggatgttccatgacggcggctgcgatgccgagacgctgcttcataccgagcgagtatttgcgataagccttgtggctttcggggtctaacccaacggcagaaatggtagctttaatgttttccgacgttattctgttgtgtatagaagccaaaatgcggagattttcaaatccggagtaaccgtctaaaaaggcaggattttcaatgagcgttccgatactgggcgggaaagagatgtctttgctgagaacttttccgtctatggaaacagtgccatttgttggacgaatcaagccgcttattaagcgcataagcatagtttttccggaaccatttacacctcgaaaaccaacgatatgtccggacgttaaaaccatggaaatatctgtgagaatatcgatgcccttaattgttttagaaacgtgatcgactataagtttcaaaggtaaaacctccttattctttttcgagtatatccatttgttctattcgcaggcagccgataacacagcttagaacgatcatgaaaaaagcggtgcaaaagccaagaaaaatagacaatccattttcggaaaaaatctcggttctgaagaacataagataatttccgggaagaaatggagatgcaaaataagcagaagagagcagcagaacacaagaaagaatatagctgaaaatgggacgcatgaaaaaggtgagaagcatttggagcagagcgatgccgcaggccatgcagggaatgagggaaagctctgggaggatattccacggaggggctttgaggtatgtgccggcgtttaatatagcaggagcgtattcgcttggttgtaaagtgacttcgccgccgaggcagatgcaagtgagaaaagcggtgagataaagtacagcaaaatacatgagcacaaaactgacacaccatacacattttgaaagataccatgttttgcggtgctgtgacaagattaacatgcttttaccgatgccgcttaaattctctgaggggtagcgtagtgtgaaatataataggagcaaaaatacaaatatccacaaagctggaaataagaaaggctctccgtcttcatagtgaaattccttcatgccgcctaaaacagaaaggagcagatcaccgcaggtaaaacggagaggtgtttctccggatttttgcagtcggatattttgggcatatacacgaaagaaatgaaaagagaaaaaacaagaaaacacgaataaagcgatgacatatttcttccaagcttttaaaaggccgttttttagatcgaaccgaataaagttagagaacatcggaacaaagcccctttctccaatatacgagaagatcaaaaagcagaatgacggcaatccacacgagaatcacccagccgctgtttgtatattcaatcgctcttggaataataaagtaaaagggcgaaagctgaatttggagatttaaaatagaaccagcaaagtggctccacatgacgtggaagaataggagaaggaggtaggggaggatcatcacgacaaaccgattctgtaccaaaaaagcgagggacacaccgactgtggcccacataccggccatgacacctgctaatagtatgtataagagcacataaagcaatggatgagttacgtagaggctactccaaaggtaggtgacaggaacgccgtagtatagatcggcataaggttccggtcgaaaggcaggaacaaagcaggcggaaaggatgaaattggtgagtagcggtacgatgatgacaaatgcaccagacaaaaacgaagcgaaatactttgaaatgtagtacgcaggtttaccggcgctcaaaatcatatggctttcgtagccgctctgtttttcggaaaccagagaccatgaaaatggaaccgtgcagactaaaaacacgagaaaataaaaggcggcggtcgtaaattgaccagcatcgccgccgagccatttgcaataaaggccggtagcgggcaaaaagagcgttgttagcggtgcaccattttcatcaaatctgtattgtcgccataagtcaaagccagattcgcgtggtaattccatgaagaagacaccgaacacggaaaacgccaacataagaaaaaagctgatgtaaaagaaacggttatgaaaagcttggtgcaattctgctttcagtgtatttttcatttctgtgctcctttacttaagtccatattgagatcaacaccgtacttctgcacacagccatttgtgccgagctttagaatcacgtctttcggcgtatcgtctgcaaagaaaccgagctgaaatgtttttgatgtaccgggcgatagttcaccatgaaaataatcacgtgtttcatcagaaacggcacggtggtcgctgtaatatataggagacatggtaagaaaacgatcgctttgcacattttgactttcataagcttctgctgagattaggtcgccgatgaaaaaagtcatatcaccggttgtctcggcatcaatgttttctagtgtgatgtcaagcagaatgaaaggtaagttgtcatcgcgcgtgtaggcgcattcttcaggagaaatgccggcatccgaaatagaaggatacagctctgctttattgacagtaaggcgcatactgccggaaacccatgggagtgctgcatcgtaattgccgagaaggccggtagttgcaaggtcttcttcaacgcttaaagtgatgggctcgccaatttgtacgacggttgtaccggttttatttggggaactgctttcggaatcagtggatgaagagggttcagcggcagaggaaaattcagtggaagacgtatcttcaggcggtatgtaaccttggtggttatctaataattttaaaagtaaaaagccgagagaggtcagaagggcgacaatgaggataggcaggataatgcgcagaaaaatttgtttgttactccatttggctttttttgctatgtgttttttggccattttatggtcgcctccgtattaaaaccaatttataggacaaaatctgcgaacagttttgccgttcgcagattttgcaatcattttagctggtttacgtggtggaaccaagataccggtaactgccagcagaatcagggctccacaaaccggtagcacttcgatttgatccccacttgtaaccgccaagacgtgccgtgcggtatccgttttcataaacccattggctgataagaccagggttattggtcgttttcaggtgaggctgcccacgggtggttttatctgtgcaatccatccattcgccagcgcttgagtcatgtccatcgacatacacatcaaagcctccgttgcaaatggtattggcgatgatgtatgtaccggaagtgtctgtttttgaacgacctgtggtattggatcttccccaatcgctaaaagcaaaagagaatgcggtgtcgtcatggttattgtaagtagcggtttcagctgctgatgcagaaactgccatacaggaaaaagccataacgacggctgcaagtgttgctgcgaactttttaatacccatttctgtacctccatttttgtttcttttaggtggccaccttgtgattgcatcgtaccatttgcattcagatttgaaaatattttttgctccaattaggctattttgtgtattgaattgctgaaaatgggataattcgatacataagattatacatttgaagcaagagatactgcacattgcttcaaaatgtggtaaatataaatatagaaaaatttaaaggaggtaattttgttggctttaaatgattatttggttccacttaatttatcactaaaagaatttgctcaaagaatgatacaaaaagagaatagtgatatttcaccgggacatccgtttagtatgaaattgtttgaattattagttgaaggaggatgcgatttttatgaattgctttcgatttattccgaaatacctaaatttgaaaataatgaaattgatgagttaatgattttaagtcccgcaccgaaagagcgctacacagtaacgaggaataatatacgcacttgtattccccgttggacatcttctaaatatagcagtggcccgatttcagaagttgtagaatctatcatagatagcttgacagattttacgccacgggttagagtatttaatagtaacttgaatttgagaaataaaagagcagtaaatgaccgatatattttgatgatttctgagaaaaatgctctgtttatggatataaatcgccggagcacatattctttttcgtaaataggaggtgcgagaatatgatacgaattgctttgtgtgacgataataaagaagatatgttgcagttacatcagaaaattattgagtggtatagggaaaacagtaagaatcaaagtgtttctataacggagtacagtgatagcgtatatctttccagtgtgatcgatgcaggtgattcacatgatgtttttttccttgatgttgaaatgccaaaagttgatggttttcagcttgcagataaaataaggaataagctgcctgctgccattatcgtctttttaacctcacatagtgaattggcaccggacggatataaatttcgagctttacggtatgtttctaaattggtattatctcaaaagttgccggaagcattagaagcagtacagaaagaattctctgcgttggaatccgggtatctggtcgttccacattatacagacgctttgcgaattccgtataacgaaatattatatgttcagcatattttgcgaagctcacagatttatacgctgcgacaaggcgtcatcaaagataatagaggattaaagacaatttatagcgtgataggggataagaggtttatttatattgatcggagtacctttgtaaatattgatttcatccgagaattaaaaggcaatgaaattatccttcgtactggtgaatctttagccataagcagacctatgttagcgaatgtaaaagaaaccattgttagaatgtggagataagagatatggataaggtttaccctttgatagaaatgggtgctacatatattgaaaatttaattattcttatggctgtgataacgatttccggacagaaatttaaaggaatgaggtatgcactctttcttgcattcttctcgctcatatcctctgttattgttataggtatgaatgaaatatcggttttttcttttttaacaccgatactaactatggctttcgttatttttgttacatctaaaatagcttcaaccggttcattgattgttcgcataacggcgtgtatgttggcttttttagtggttcaaacgattgattatattcttgtagttttagtaggctttgtttatggcgtaccacatgatatgtttaccgaatttacaacggtagggcctaagcgttcattgtatttgttgatcgataaactgacggatgtattgctctatctttttatacgaaagcatattaagggtctaaaagtactttcgataaaattgcagatggtgctgtgctcgttgagtattgtggcgtatacagtgatgcagctcttattcggtatggttattaaacccgatttaatgactatgcagatcgcggttatattctcatggttgttcgttttgtgccttattactgttgttttttcccttttttctgtgatgaccaaagctgaaaaggacaagcaaatgcaggagattttgcaatcggagaacgctttgatggcgcgaaattatcaactgattcatgcagataaagtggagagcgctaaacggcagcatgattttaaccaccatttgaaagttatgcgcgagttggtacgggaacaaaaaataggagagatgtcggcatatctccaatctttattagatgtgccggtgagagaaagtgcagcctgtcactccggaaacgatattattgatgcgattataaattgtaaagctgccgaagcagatcgggatcatatagaatttgaatttaatgcggattttcatttaccgacatctttgagctcgatagatatttgcggtgtgctgtctaaccaaattgataacgcattggaagcgtgccgtgtgataccggaaggaaggctgcgtaaagtcattgtggagattaggcaaaaagagtgctttgcgttttttacggtaaagaacacggctgcagaaaaccctcttttgaagaatccggagcttgccagtacgaaaatgaactctgatcacctgcatggatggggaattaaaaatattcgagatacggttgagagaaataatggattcctcttacatgaatttgaaaatggatattttgtttcttcagcttccctgtgttttcgactactcgatacataaactaatacaattcgatcaatttgttttccaaaagctcccctttggtttataattaaagccaaaggggagcttttgtatgttaaataatatagcaactaagatatcgagtattatcattcaaaagtgtcgattatcttcagacttaataaaaatctatacctatggttgtgaattgcttatatcaacgggattaggtatgatgtcggtattcttgatttcttgcctgcttggaagacctttatctggtattatattcttaattgtttttgtaagtttaaggctgtattgtggtggccttcatgcttctacatatcttaggtgctttatactgagtaatttggtctttctttccgtttacggtttgtcttggggcctaacctatgtttcgtggcttttgagtgttctgctattgctgataagttttattgtaatttttgcttttacaccgattagaaatgttaaccatcccctttcagacgaacgctacattcgcaataaaagaatatcacgagttctggcttttactgaaatgatagtaattttggcgatttataccattataagaaatatttattttttgtctattgcttcaacttctatgttcgcagtatcctttatgatgctaatcccaaaaatctgtcaagcaaggagagtacgttatgaatgaattctggaacgcaatcgcaaaactgatcgaaactattgccaatttaggtgctggcgctgcatctaatggaatgggttatgaacccacagtgccggaggaattggtgaaataatcctaacctgttatcccatacgttaagattacaatcaaaacaaaattaaatccaaagtcgttctcgcatacatagaagtgaataaaatagaaaagtcgggcaagttcatgatgtgacttgcccgatccttttagatacatttacaaatacaggaaatttaaatttttaaaaggtaagatgagtgataatgacccaattagaatttgaaaccgaaaaagaaaagtggataaaacgcggtgagataaaaacatacaatatgactgaacttttgacccatgacgaggagaaaacagaaaaccatttggccggtgcagaagtgtatgcttatgcagcgtacacgtctcgcctgcatgtgatgctgtatacggtgcaaacggtttggaatatcttaccaaacggagacacgggagatgttattcgagaaaattataaattgctgcttgcattttgaagaattgaacggatgcggaaaaaccggcaatgttgccgtttttttctgtgtgaataaagatcttgccagaaaaggatatttcttgtagaataaaaacgaactgcaatacgcagttcgggtgctgccataacggtggacggttcagccctcagatatacttcggtgtaccgtgcgagggaacatttcttgaatatgaaaaaatccctcaatccaacacggagagagggatgacgcttatgaagctcgagctgaattttagcgatttgtgccagttggcacttgtcgttataacgaaatactttgttttaatcgatacgcacaaccgaaacgtaagtaacagttgtgcgtatacattagaacaaaatatggtgggcgctaacggacttgaaccgctgaccccctgcacgtcaagcaggtgctctagccagctgagctaagcgcccaattttctgttgctcgattattatatagcaagtccccgaaaaatgcaagtcttttttgcgaaaaagttaaaattaattttcctttcgtgaatatcacgaaaaagtgcgtaaaatttggtgcactgttcgcagaaatttaaggtttcttacaaaactcataagaatcgcacatttctattgtttattccttttccatgccgtataatgaaaatactgaaaactgtgaatagaatgtgaatgaaagcggatggcggttgcgcattgtgctttgaatacggagatttagacagaattggaaatctgaaaacagacgatgacgttggtcttgcaccaaggccggaaaaggagaaaccatgaaaacactgtcatatgtgaactttatcatttctattttatttatggcttgctacgcgtaccaggcggtctaccttgtggcggcgcttttaaaaaagcagaaagtcttcaaagcgaagaagctgcaccgctacggcgtgctgattgccgcgcgtaatgaggaagccgtcattgcgcagctcatccgcagtgtgcgcgcacagaagtatcccgaggagcttatcgatatttttgtcgtagcggataactgcacggacaacaccgcgcaggcggcgcgtgaagccggggcggtcgtttacgagcgccacaatacgtatgccgtgggcaagggctatgcgctgcgtttcttattagaaaacatttttaagaatttcggcgaatatgcctacgacggttttttcgtctttgacgcggacaatattctggatgagaattttatctccgagatgaataacgtttttgacaacggctacaaggttgtcacgtcctaccgcaactcgaaaaactttggcgacaactggatcagtgcaggctactccattttcttcctgcgcgaagcgacgcagctcaatcgcgcccgtatgatgttcggcaccagcagctgcgtttccggcaccggctttttgttcagcagcgagattgcacgcgaaaacgatggttggaagcatttcctgctgacggaggactttgagttcaccgtggaccgcattttaaaggacgacacggtcggttactgcgaaaacgccattatttatgacgagcagcccacgcggcttgggcagtcctttacgcaacgtgcccgctggattaagggctatttgcaggttttcagccgatacggcttcaaaatgctgaaaaaaaccgttgtggatggcagttttgcctgcttcgatatgattatgaacaacattccgtgccttgttttgacctgcgtttcaatcgtgtttaacgcgattatggtcgcggcgggcattgtgacgcgcacgccggatatgggcgtttgcgtgctttccgtgtgcagcggcattttcggttctatactgacactgtggtttgtcggcggtatcacgtgcatcacgcagagaaagcgcatccgtgcatcgacaaaagcgatgttcttcggttggctgttgttcccgctgtttattttcacctatgcgattgcaatggtttacgcggtgtttacgaacattgaatggaagcccattcagcacaaagtggcgcttagtgtggaagacctgaacgacactaccaaaaaatagcacaaaattgcactcgaaaacagggcgtgatttgctataatctatatttgcttataaacggcacctgtgataaaatagtaagagattactttgtcacaagtgccgttttttgcggcagtataaatcctgatttttccccagaagaaaggaatggtcacaaacatggtcacacgcgtatttgtggagaaaagaaagggattcgatgttgaagcacgccacatgatggcggatcttcgtcagaatctcggcctcaaggctattgaggacctgcgtattttgaaccgctatgatgtttccggtctttccggcgaggagttcgaggcggcagcccgcacgatcctttccgagccgaatgtggacaacgtgtacgacgaaaactacaagatcagcagcgaatatcacgtcttcgcaacggagtttttgcccggtcagtacgaccagcgtgcggattccgcttcccagtgcgtacagctcttgacgcagggcgagcgcccgcaggtcgcttatgcaaaagtgatcgccgttaagggcgacctttccgaagaggaaatggacaagattaagaactatatcgtgaacccggtcgaatcccgtttggcatcgatggaaaagccggagacgcttgacatgaagatcgacgtgccggcagacgttaagcgcgtcacgggcatgatctcctggagcgacgaggagcttagaaaatattacggcaccatgggctttgccatgacgtttgaagacctcgcgttctgccgcgattatttccgcgacgaagagcaccgtgacccgagcgtgacggagctgcgcgtgattgatacctactggagcgaccactgccgccacaccacattccttacgcgtctcaacaacattgagatcgaaaagggcaagctgagcggcgccatcgaaaaggcactcggcgagtattttgcagcccgcgaagagctgtataagggcaaggacaagcccgtttctctcatggacatggcggtcatcggtgcgaaatacctcaaaaagcacggcatggtagacgatctggacgaaagcgacgagatcaacgcctgttccattgaagtgccggtcacgatcgacggcaagaccgagcagtggctcgtgcagttcaagaatgagacccacaaccacccgacggagattgagccgttcggcggcgcggcaacatgccttggcggcgcgatccgcgacccgctctccggcagagcgtatgtttatcaggcgatgcgcgttaccggcagcggcgacccgactgttccgtttaaggatacgatgaagggtaagctgcccacaagaaagattaccaccggcgctgcggcgggctattcctcctacggcaaccagatcggccttgcgactggtcaggtcacggagctttatgaccccggttatgttgcaaagcgcatggagatcggcgcggtcatcggcgcatctccgaaagcgaacgtcaagcgcttcgagccgaagcccggcgatatcattgtgctgctcggcggcgcaacgggccgtgacggctgcggcggcgcaacgggttcctccaaggcgcatacgctcgaatccatcgaggtttgcggcgcagaggtgcagaagggcaacccgccgaccgaacgcaaaattcagcgtctgttccgtgacccggaggtttccacgctcatcaagcgctgcaacgacttcggcgcgggcggcgtgtgcgtcgccatcggcgagcttgcaccgggccttgagattgatttgaacaaagtcccgaagaaatacgagggcctcgacggcaccgagcttgcgatttccgaatcgcaggagcgtatggcggtcgtgctcgacccgaaggatgtggagaaattccgtgctaaggcgcaggaggaaaacctcgacgcgcaggtcgtggccatcgtcaccgaagagccgagactcaagatggagtggcgcggcgaccgcgtagtcgacctgagccgtgcattcctcgatacgaatggtgtgacgcagaacgcagacgcgttcatcaccgcaccggatgaaacgaaaaactaccgcaacgccgtaccggcttgccttgagaataaatcactggacgaggcgttcgcagagaacctctcccgcctcgaagtctgcggccagaagggcctttccgagcgtttcgatgcttccatcggcgcaggcaccgttttgatgccgtttgccggtaagtatcagctgacgccggaagacgccatggttgcgaagattccgctgctcacgggtgagaccgatgacgccaccgctatggcttacggctatattccgggtattgcgcgcttctcgccgttccatggcgcagcgtatgccgttgtggagagcctctcgaagctcgcagctgtcggcgcagatccgatgaagtcccgcttgacgttccaggagtacttcgagcgcctgcacgataagccggagcgctggggcaagcctgccgcagccctgctcggcgcactcaccgcgcagctgaaccttggcctgccgtccatcggcggcaaggacagtatgtccggctcctttgaagacctcgatgtcccgccgacgcttgtcagctttgcggtgacgatgacgaaggccagcaagacgatctccggcgcgttcaagaacgccggcagctacgccgtgctgctgccgattccggaggacaaggaaaccgagctcccgaactgggaagctttgaaggcatactacaagaacgtgcttgcaaaaatcgcggacggctctgttctttccgcacacgtcgtcaaggaaggcggcgcggctgctgccgttgcgaagatggcgttcggcaacaagctcggcttcaagttcgagaagactgccgaaaacgcagagctgctttttgccccgaaggccggcgcactcgtcgtggaagttccggcagatgcgcttgagagcgttaagaatacattcgacgctgttgtgctcggcaccgttaccgatacggcaaagattgagctgaacggcaaagcgctcgacttggacgacctcattgagacctggaacggcaagctcgaaaaaatcttcgcgaataaagcggagaccgtcgccgtagaatatgatgtgccgctcgataaccacaagtacaccggctccccggtcatccgcgtcgcaaagccgaaggtattcatcccggtattcccgggcaccaactgcgagatcgacacgaagcgtgcgtttgaaaaggcgggcgcagagaccgagatccttgttgtgcagaacctctgcgcaaaggacatcgaatacaccatcgaccgcatggaaaaggcaatccgttcctcccagatcatcatgatcccgggcggcttctccggcggcgacgagccggaaggttccggaaagttcatcgcgacaacgttccgcaacccgaagattgcacaggcggtcacggacttgctcgacacgcgcgacggtcttgtgctcggcatctgcaacggcttccaggcgctcatcaagctcggccttgtcacctacggcaagatcgtggacctcaaggacgacgacccgaccttgacgtttaacacgctcggccgccacgtttcccgcatggtctacacgcgcgtgacaaacacgaagtctccgtggctctccggcgtcaacgcaggtgatgtcttcgccatcccggtctcccacggtgagggccgctttgtagcggatgacgcagcgctgaaaaagctcatcgaaaacggccagattgccacgcagtacaccacgccgtgcggcaaggtgagcggcgacatcacatggaacccgaacggctccgtgtgcggcattgagggcatcacaagcccggacggccgcgtcttcggcaagatgggccacagcgaacgcaagggcgaaaacctctactttaacgtgccgggcgaaaaggatcagcagatctttgagagcggcgtgcgttacttcaagtaataaaaggcagaaacgccttataaaattccggtatgcgcgggcaaaatgctgcccgcgcagccgcgtacaaggacaatttggttatggacattttacagaaaagaacatgggcgcagatcgacctcgacgcggcggcgcacaattttaaggaaattcgccgctatgtcggcaaccggtcgatggtctgctgtgtgattaaggcagatgcctacgggcacggcgcggtgcgcatggcagaggaatacgaagccctcggcgcagactggctggcgctttccaacattgaggaagccttgcaggtgcgtcgtgcgggcatcaagctgccgctgctcgtgctgggctataccccggcggaagccgcagacgtgcttgccgaaaacgacattgcgcagtgcgcgtattctgcagaatactgcgcggcgctctccgaaaacgccgtaaaaagcggcgttaaggtgaagattcacgtcaaggtcgataccggcatgagccgcctcggattctattttcaggacattgagcgcgacaaagaggccgtaaacgttgtggcagaagcgtgccgccgcccggggcttatcccggagggtatcttcacgcattttgccgtggcagatggtggcgagaatggcaaggcatttaccttgaagcagttctcgtgctttatggcgctcatcgcggagcttgaaaagcagggcatcacgtttaaaattcaccactgcgcgaacagcggtgcaatcctcgattaccccgagatgcacctcgatatggtgcgtgcgggcgtgattttatacggcatggaaccgtcgctcagcgtggagcatcacgcggatttccgcccggtgctcagcctgtactccgtcatttcgcacgtgaaggagattgagcccggatcggacatcagttacgaccgcacattcaccgcaaaggaacgcatgcgcgtcgcgaccattccggtcggctacgcagacggctactcccgcaggctttcgaaccgcggcagtgtgctcattcacggtacgcgctgcccgattttaggtaaagtctgcatggaccagtgcatggtggatgtttccgtcgtgccgcaggcgaaggtaggggacaccgtaacgctcatcggccgcgacggcgaggatgagatcaccgcggcggaaattgccggcatcatggagacaatccactatgaagtggtgtgcgacatctcaaagcgtgtcacacgagtctacctgaaaaacggcaaagaagtcagtgttctggactgtattttggacaaatattgattgtaaagcagcggcttttggttccgttcagccgggtcgctgctttaaatttgtagtgatttggaagggtgaaagtgatggaaaagcttttaaagctgtgcgatgaaatgaaagaggatttgctgcacggttctattttcccgttctgggagcaatataccatcgatcacgaaaacggcggcttttacggcgccgtgacggttgataaggttattcacaaggacgcgtccaagggcctcgtgctgaatgcacgtttgctgtggacatttgcgggcgcgtaccgcattttcggcgacgagaagtataaggagctcgccgaccgcgcgtttaactacatcgttgagcgcttctgggaccacaaaaatggcggcggtttctggatgctgcatgcagacggctctgtggaagacgacacgaaaatgacctacggccagggctttttgctgtatgcgttctccgagtacgtccgcgcaacgggcagcgaggaagcacgcaggtatgccgatatgacgtatgattacatcgaaaacgagtgcaaagagggcaactattaccttgaaaacgcacgcggcacgggcagcagcaacggcgccattacagaggcaggcaacctttccatgaacacgcacatccacattttggagccgatgacgtgctacttccgtattcgccacgatgcctgcgtggaggagagtcttgtgaacctcatcgagatcaccgcacgcagaatttacgacaccgagcaccaccattttgtcatgttcttcaacgataaaatggagccgctgccgggcgaggtttcgtttggccatgacattgagggttcctggctgttgacggaagctgccgaagtgctcgaaaagtacggcgcagataaagcccgtgcggaaaagctccttgaggaagcgaaggaggtcgccatcaacatggtgaacttcacgctgagccacggcatggatacggacggaggtctgtttgacgagggtcacgaagaaggcggcatcgctgtgccgaataaggtctggtgggtgcaggcggaagccgttgtcggcagcgtgaacgcatggcagattacgggcgacgaaaagtatctcgattccgcgctgaagagctgggcatacatcaaagccgaaatcatcaacggcccggcgggcgagtggtttgcaagcggtaaaaattccccggacgaggaaaattcacacctgctgtgcggcccgtggaagtgcccgtaccacaacgccagagccgcgtttgaaatttacgagcgctgcgaggcactggaaaagtaaacagcaacagcaaagccctgccgagaaaattcccggtagggcttttgtcatgctaaaattaaatttaatcgaacccgtagttttccacgcccgaaagctcggagtgcgttttggcatagctctgcgcggcggtgtaaaaatcctcccaagttttctccggcgcaccgggggaaagcggatgcaggcgcaaattgctgtcctcacgcacggcggcataagcgtaatcgctgtaaatcaaaatgcccatcacattgtcgagcaggtcgtagcttcgcggcaactcgtaaatggtctccgtatccgtcgtttcgagcacctcaaggtcaaatacgtgcctgtactgcccggtgacgtacagagcgctgaggtcggtgaacccgttttcaagaaaaacaggggagtcggcgtcaaaatagagccgcagcacggaaacgtcgccctctgtgccgccgaattcgagtgcgggcacatcgaccttgtgcgccgcgcagccggaaagcaagagcaaaatactgaggaaaaaagcaaagcgcttattcatacattgaaatcacaccttttttatttttcaataaaatattaacattttaaaacttatatgtcaataataattgttggaattttcaagaaaaatgatgcgaacttaaattattaacaaaactaataagaatttacaatgtgtattcaattttaagaatacaaaacgaccgctctccgaatactcgaaaagcggtcgctttcttatttattcagtaattcgtcaacctcgacgggttccagctcttttaatgccgggtggtcggtcagcgttttcagcatgcgccaaccgaaatgattttcttccaaattctccggcacgggacggaagccgaaatcaaggtacagctttgcggcgacccatgtggtggtctgggtgggcacgaacagctctttgtagccgagcgcctgcaaacggtgcagcgtgtgcgcgatgagcgggcgggaaagtcccttgccttgcgcgtcgcggcttacggaaacccaatgcagccagccaccgggcagcttttcatcgaaaaacgccgttgcggtcgcaaccttcttgccgttcgggtcgacgatgaagaacattctgtcgggcagaacgtcttcgtgcttgccgtagtagcgctgccacgcgtccacgccttcctcaaaagtcgaaaactctttcgccgatttttcaatctcaatccacgtatcgcggtcgccgggggtgtaggttgtgaacgaataccccgcgggcagatcataatgcggaatttccgttttcgccggcatggtcatgaacagatggtagtacttcaaacggctgtcgtgattatctaaatgtaaagaagctaagtctttcatagatttgatcatgaattaggattcatttctgccgcagcatttcttgtatttcttgccgctgccgcacgggcacgggtcgtttctgccgggctttttgccgtttttgcgcaccggctgcttgacggccggcgtatcggaggatgttgtgccggtctccttggcgacggcttcacgcttcggtgcttccggcgtcttcaggcgcacagtcagaatcatgcgggcggtattctcgcggatcgtgtcgatcatcgcgtcaaacatgtcaaagccctcttcgcggtatgcaatgaccgggtcttgctggccgtaggcgcgcaggcggatacccttctggagctcatccatcgcatcgatgtgatccatccactgcgtatcgacgttcttcagcagcaccacgcgctccacttcacgcatgatcggcggggtgaacgccttctcacgcaggtcgtaaagcttgtgcgcacgctccttgagaaaatcgatgaccgtttgctgctcgagatcctcaaacgcctgaccctcatagtgcagctcatccggattgaccatccagccgaggtagtggtcgcgcagaccgcggagatcccagtcgtcgtgcagggtgttctccggcaagaagcgcttgacattcgcttcgatggcctgatcgatcatggacataatctgcggcttcacattgtcgccgttcagcacacggtcgcgctgctcatagatgatctcgcgctggcggttcatcacgtcgtcatactgcagaacgttcttgcgaatggcaaagtttctgccttcgaccttcttctgtgcgttttcgatggtgttggagaggatagacgcttcgatcggcatgtcctcgtccacattcaagcggtccataatggtctggatgcggtcgccgccgaacagacgcatgaggtcgtcttcaagagagatgtagaagcggctcttaccgggatcgccctgacggcccgcacggccgcgcagctggttatcaatacggcgagattcgtggcgctccgtgccgatgatgtacaggccgccgagcttgcgaacttcctctgcctccggcgcaatctccgctttgtattttttgttgagctccgcaaaggtcttgcgggcattcaaaatctcttcatcgtccgtgtagccgtaggcggaagcctcgccgatgagctcctcggagaactgcatgcggcgcatttcggcacgcgccatgaactctgcgttaccgccgagcagaatatccgtaccacggccggccatgtttgttgcgatggtcacggcgcccttacggcctgcctgtgcgacgatttcggcttctttttcatggtactttgcgttcagcacttcgtgcttgatgccgcggcgcttcagcatggcgctgagttgctcggatttttcaatcgtgatggtaccgaccagcaccggctggcctttttcgtggtgctcgatgatgtcgttgataacggcattgaacttgcccttttcggttttgtaaacaacgtccgggcagtcttcacgaatcatcggcttgtttgtcggaatctctacaacgtccagtttgtaaatttcgctgaactcggattcctcggtcatggccgtgccggtcatgccggagagcttgttgtaaaggcggaagaaattctggaacgtgatggttgcaagcgttttgctttcgcgcgcgattttcacgccttccttcgcttcaatggcctggtgcagaccttcgttgtagcgtctgccgtacatcagacggccggtgaattcatcaacgatgatgacttcgccgtcgcgcacgacgtaatcgatatcgcgctgcatgatgccgttcgccttgattgcctgattgatgtggtgctgaatggtgatgttgtccgggtccgtgaggttttccaagctgaagaactgctcggctttttttacgccgcgcttggtgagcgttgcggtcttctgcttttcgttgatgatataatcgtaatcctcgtagatctcgtcattgtcttccttttcgttcgtctccgccacgcggatggggcgcagggtctttgcgaagcggtcggcgacgttgtaaagctccgtggactgctcgccctgaccggaaatgatgagcggggtacgcgcctcatcgatgaggatggagtccacctcgtccacgatggcgaagttatggccgcgctgcaccttgcgctctttgtaggtgaccatgttgtcacgcaggtagtcaaagccgatctcattgttcgttgcgtatgtgatgtcgcaggcgtaggcttttttcttttcgtccggctccatgccggggatggcaaggcctacggtgagaccgaggtagttgaacacacgcgccatcatttcgccctgatattttgcaaggtaatcgttgacggtgacgatgtgcacacccttgccgtttaaagcgttgaggtacgccgggagggcggcggtgaacgtcttgccttcgccggtcttcatctcggcgatgcgaccctgatgcaaaatgatgccgccgataatctgtaccgggaacggcttgatggtgagcacgcgccacatggcttcacggcacgttgcaaacgcttcgggcaggatgtcgtcaagggaagagccaagggagaggcgctctttcaacacggcggtctggcccttcagctcctcatctgtcatttttgtgtatttgtcatcgagcgcgagcaccgcttgcttaagcggttcaatgcgctttaattctttcttgctgtagctaccgaacagctttgtgagtaggttcatggttcgggaacactttcctttctttcgcgcggattccccgcgcgcggcatataaatcagtatagcatggaacagcataaaaaagcaagcgataggggcatattcatgaaaactttataggtgatcaaaaagaagcgcattttaaaacgcaaaaacggcagtgcaattcgagaaaaacagcaaaatacaggatagccttagccgaaatgcacaaaaaactctttttttccaaatcataaacagcttatgaacaaaatgtgactttttattcggttttctcttgattttcgcaaaattagaggctatactataggtaacaattcctgtttttccgatgtgtgcaaaccataactggtcaaaaaaacgaagaacaggaaattctttaatttataggagagtgaacatccttggacaaattcttcaaaatttccgagcgtggctcgaacgtccgcacagagatcattgccggtctcacgacgttcttcgcgatggcttacatcgtagtcacgaacccgaaccagattgttagcttcaaccatctggctccggatgccgacccggccttccagcagatttggaacgctgtgtatgtcgcatccattctggcagcaatcatcggtacgctgctgatggctctgtatgcgaagatgccgtttgcacaggcttgcggcatgggtctgaactccttcttcttcgtatccttcattctgccggaaatcatctccggcggcgacgtcatcaagggctaccatgcaggcctcgtcatcattctggtttccggtattgtcttcctgctgttctctgtcacgggtctccgtgtcaaggttgcaaaggctcttccggactgcctcaagaaagcaatcccggccggtatcggtctgttcatcgctttcctcggcttccagaatgtcggcatcatccagactaaccagtacacgctcgttcagttcgttgatatccacggcgcactgaaggcaggcgcattctttgcggatgttgaaggtgcaaaggcatttatgccggccatcctcgcattcctcggtctgctcgtcatcgcaattcttgaaaagcacaacgtcaagggcggcgtgctcatcagcatcgcaggcatttccgttctgtactatctcctttccggcacgaccccgaccttcgacatgagccagatcggccagacctttaaggatttcggctccatcggcatcaccggtgtgttccaggctgacgcatggaagcgtgcgtttacaggctctgagctcggcggcatcttctccgcaatcatgctcatcgttacgttctgcctcgtcgatatgttcgacaccatcggcaccctgtacggcaccgcttctcaggcaaacatgctggataagaacggcgatccgatcaacgttaaccagtgcatgaccagcgactccgttgcaacggttgcgggcgctgtttgcggtacttctacctgcaccacgttcgttgagtccgctgctggcgttggcgctggcggcagaaccggccttacgagccttgttgttgcaatttgcttcgcggtttgcctgttcctcagcccggtcgcttctcttgttccgacctgcgctacggctccggcactcatctatgtcggcgttctgatgatgaagggcttcgcaaaggtcgatatgtccgacctgcgcagcgctgttccggcgttcctcgctctcatcatgatgccgctgacctactctatctccaacggtatcggtatcggcgcgatcgcttatgtgctcatcacgctcttcaccggtaagtacaagaagaacgacatcggtatcaccattatcgctgcgctcttcgtcattaagtttgtctttgttacgatgtaattcgtacataaaacgaactttagcttgagataacataagaggcgctcgcttgtgatttttcacggcgggcgccttttttcgttttattgcgcgtttttgtcctgctatactttgggcatatcggacgagtaaaaggagcaggcgatgaaacaggcggatagtttgcttttaaacgcgttgaaagcagcgatacataacgaaaaagcggcgctcggtgtgctgccgcaggaaacacagacggagtttttgcgccaggcggtgcgccacggcgtgctgccgcttgttcttgatgcgtgcggcaaggcattgaaagctgcgcggcaaatggcgttttgccaaacggcagagcagattttgaaaacgcaggtatttttacagctttacagcaagctgcgcgaaatgaaattgcatccgctcgtgctgaaaggcccggtgtgcgctgcgctgtacccgaagccggagctgcggctgttttcggatgtcgatttactggcggtttcgggtgaatttgaccgcacacgcaatgctttattgcggctcggctgccgcacagcgggggagagtgtcgatccgcttgaacagacattttacctgcccggcagtccgctcgttttagaactgcacggcgcggcgttcccggaaaacgatgcgtatgggcatatgaacgctttttttgcgcatgaaaagctgcgcacggaaaccgtttccgtgcagggcgaagaaatttatacgtttggcgcgaacgagacgtttttgtaccttttgtgccacagcttaaagcactttctgcacggcgggtgcggcatccgcgcggtgtgtgatttgctgttgtttgccgaaaagcatgaaaaggagcttgacaaactgtatttgcgccgctgctgcgaaaagctttcggcactcgaatttttgacggcgctctttgaaatcggcgagaaatatctcggctttgagaaaacggaaagcttagcgctgcttcgcgtgcaccctgcgccgaatgaaactgcgcttttggaggatattttgataggcggcgtgcacggtgcggcagaaaaaagccgcttgcacagtgcgaacatgacgctgcacgcggcggctgtgcagaatgcaggaaaacgcgagcgctttcccgtgctgcgtgcggcgttcccctctgcaaaagcgctgcattgcgcgccgcatagcttgcctgccgcatggggaaggcggcttatacgctacggtaaggaaagcattcaaaaccgtacgagtcttagaaaaagtgtcgagatcggcaagcggcgcgtggcgctcctcaaaacatatcacctcataaaataagccggcggctgcgcccaactcgggtacagccgccggtgctttatttttgattaacggatgcggaacgtcttgacctcatacggcttgatggtgaatttgaatgttccgccttcgaccgggacatccgtgagcgcattctcctgcaagtcacactccgtaacggaagcgaaggggcggttccaatgcagttttgtcgttgtgcgggcgttttcacattcgtacagacgcacgatcacgccgtcgccgtcttccgcctgcttgacggtttccaaaatgacgtttttggcgtccacactcacgagagagtacgcttcgcctgctatgccgcctgcggtggcgcgcacaggctgattcaggaagtacgcctgcgctacggtctccgcgctgcgccatgtttcggcgtgcggatagagcgcgtaggtgaatacgtgcatctcctgatcggcgacagggttcggctctgtgccggatttgatgagcgtcagcgccatttcgccgttgtgcacggagtgaccgtatttgcagtcgtttaacaggctgatgccgtagtgaccctcggaaacatcgatccacttttggccgcagctctcaaagcgtgcctgatcccagctcgtgttctgatgtgttttgcgcgtcacgttgccgaactgaatctcaaatgttgcttcgtctgtgtgtacgtccatcgggaagtgggctttcaggaggtgctggtgctctttccagtcgaccgttgtctcaaagtcgatgcgcgggcacgcggcgtagaagtgaattttctggcagatgaccgaacagctgaccttgcgctcagtctcgagagttgcgcgcacggggccgcgttccgtccattccatgcgctgcacgatgcgcagacggtaaagctcatcacaaatgcgctccacacgtttatcgagatacctcatagttgcaactccttttctatagcggtttggggtttcgtaaagactagtgcttttgacttgattttagcataataaggtacagaaaacaagataaaatgcacagattcttccggcttttcacacattagaattgtctttacgcacacgtcgcgtcgaaaatgcagaaaaacaagttatttatgcacagaacacaaaaaataattgaaaatcagcggaaagtacgctatactaaatctataaatcagagcgcattttgagaaaagcaacggtggctcagccccgaaaaacagcagttttggagtgccgtattcaaatcacatcacatagaaaacagagggaaaaatatgcgaaaaaaggcttgtatccttttgctttttgccacgcttatggcgctgctttgcgcatgcagcgatacggcacagcaaccggagacggaaaaaccgaaaatacgtatcggcggcacaacgtatgcgccgtatttttaccgcaatatcggcggcaactataccggcatcgacgtggagattgccgaggaagcctgtgcgcgtatcgggtatgagccgatcttcgtggagctcgatatcgacaagggctttgagcttttgaatgaagactatgtggattgcctttggtgctgcctgacgatggaaggcaacgaagataagtttatttgggcagggccgtatatgtacacgcagcgcgtggtcgtggtgccggcggacagcgagattgaaacactggaagaccttgccggaaagtgcgtggcggtgcaggccggctctataagcgaggagatcattttaaaagggctgaacccgaatttgccggagattacggacctttccacattcagcacgatgggcgaggtgtttacttcgctgcgcaagggctatacggatgcggccatcgggcatgaaagctcgctgagattatatacggacgaatacccggacggctaccgctacctcaacatgaacatgtacagcgacgccgtgggcgtggcatttaaaccggacggcgatgcagtactggcggaaaagctgacgcagacgttgcttgaaatgcgcgaagacggcacaatggccgctattgtgaaaaaatatgggttagatgccgaaaaaaatgtgaacggaggtaccgaatgatgccgaagttcaagggaaaaacaaaaccgaagctccataagccgagcatggaaacggtcatgcggtggatggtcacgcttcttctcggctgtgttgtgctgctgccggtatttgcaggcgtaacacagtatgaacagaacaaggcgaaagcggatgttgaggacgtactcgcttttatgcagacgaactgccgcaagtacgacaactaccgcttggccaataccaccgaagcgctgcaggatgttttgactaaagtcaaaacactgacggcgtaccgttacgaagaggaagatgcgcttttaaacgaaaaccgcttacagagctatgcgaaatttcagtatttgaccggcatttttgttttggatgaaaatttctccgtgctggctcattacgacaaagcgggcaaggatgaaagtctgctgctcagccagataataggggacaaaaatgcggcggatattttgcactatccgcagaaaacctatgccgaccagatctgtttaaacgacaatacgtataactacgccatttccgcacggcaggataaaccgggcctcgttatttgctatacggatatcacgcgctttcaaaacgataaaaatgagctttctctctccactatgctggatgctgaaatgttccggcaggatgtgaccgtcgtcatcacggatggcatgcgcgttatcagcacgaattgcgagcagctggagaacatacttgtgcagtattatcctattgctgacgtgctcgttggaggggagcaacttacaccggacacattgctgcaattaaaaaacgacagcggcacatggtacggtatgttcacccagtacagagattattatttgtatgcctttttcccgagtcgcgtagtctacgcaagtcgccgcggttggatgctgctgtttacggcaatctatctgttttgcggcatggggtaccttatttggcggcagtacagtaaaaagcgccgtctgctgcgtatggaaaaagaataccaccttgtcagcgccatttcgagcatttacctgtcaaacctgctcattcacccgcaggacgatacatgggagcccattgtgcagagtgagcgcatgaaagcagtcacaaacggtattttaagcgcaaaagccatgctggaaaagtttaacaccgagtgcgtagccgaggcgtaccgggaggaattccgtgcgtttacggacctcgataccgctcagcagcgcttagagggcaaggcttttgacggcttcacaatggaaaatgtggagggcaagtggtaccagctgcttcttgtgccgcagcgccgctttacgcaccgggaaaagccgagctcactcatgcttttgttccgcgatgtttcgaagcaaaaggagcgcgatatggaatatcaggaaaacctgcgccgcgcagcagaggaagctacccttgcaaacgccgccaaaacggatttcctgcgccgcatgagccatgacatccgcacgccgatcaacggcatccgcggcatggtacagattgccgaccgtttcccgaatgacgcgaaaaagcaggcggaatgccgcgaaaagattatgcggtcttcagattttcttttagagcttgtaaacgatgtgctcgatatgagcaagctggaatccggcgaaatgcagcttgaggaagtgccgttcaatttgaacgagctgctgcacgatgtgggcgtgctgctctccacgcaagcgcaggcgcgcggtattacgtgtaccctcacaatggaagataagcgcgaaaagcatgtcatcggtagcccgctgcatttaagacagatctttcaaaacatcggcggcaacgccatcaagtatggcagagccggcggctatgtacatgctacgtgcagcatcgtttcacaaacagagaacaccgttcgctaccgctttatctgtgaagataacggctgcggcatgagcgaagaataccaaaagcatatgtttgagccgttctcgcaggaaaattccggtgcacgcactacgtatcagggtacggggcttggcctttccatcgtgaaaaaactcgtcgatgccatgggcggcaccgtcaccgtggtcagcgaaaagggcgtgggcaccacattcatcacggagattccgctgaagctcgaccccgcgccgtctgatgccgaaaagccggaggaagagatcgataccaccgtgttccgcgggctgcatgtgctgcttgtggaggataacgaagtgaacatggagattgcggcgttcctgcttgaggacagcggcgccgaggtcacaaaagcatggaacggcgcagagggtctggagaaattcaaagcctcggccccgggtacgtatgatctcatcttaatggacatcatgatgcccgtgatgaacggtttggaggcggcagagaagatccgcgcgctcgaccgcccggattcggagaccgtgccgatcttcgccatgacggcaaacgcgttttccgacgacgccgcccgcagccgcaaagccggtatgaacgagcacctcacaaagccgctcgaccttgaaaagatcacaaaagcggtgcgcaaatattgcaagaaaaatagccgataaaagccataaaacggcggcgtgcctttaaaagcggttgcgccgccgcctttttatgggctgcagtgtgtctgttcctaccaaaacaccaatgtgcagaaatttcataaattgattctgaaaataagatgaattcctgtagaagttttctccacatgaaggttgaaatcatagtgttgatatgataaaataatagcgcgaattatgcagaaaatgagaatttcagacgcggctttcgcattttaagcctataaaactgctcgattatgcgaaaagcagcataaatatacgaaatacgaagctcggtttagaaagggaggacgttccatggcttatatgcggcttggcgatctgctgattgcggcaggtgccattacgcaggaacagcttgaagaagcgctgaccattcaaaagcagaagaaagaacgtctcggcgacgttctgattgaaagtaatatcatcacggagcggcagctcattgaagcactgcaaatgcagctcggcgtcgatttcatcgatttaacggcgatctctattccgttggagctcgccaaatttgtgccgcgcgccatcgcgaaaaaatacaacgtggtgccggtaaagcttgtaaaagacgagctctttgttgccatgagcgatccgttgaacttcgttgcgcaggaagagattaaggccgcttcgcataaacgcgttgtgccgatgatctccacgcgccgcgcgaccgagcaggccatcggcacattgtacggcagcgaaggcacggcccgcgccattgaagaaatgaagcgagaggtcggcacatccacaccggatatcgtgccggtgcagatgaaccagacggatgccggcaacgcgtctgccgcgccgacgatccgctttgtaaactccgtcattgagcgcgcctttttggagcgcgcgagcgacatccaccttgagccgcaggagggcgaaatggtggtgcgcatgcgtatcgacggcattttgagaaagattttgaccgtgcccgcaaatttgcagagcaacgttatttcccgcctgaaaatcatgggtggcatgaatatttccgagcgtaagatcccgcaggacggccgtgccatggtgcaggtacgtcaccacgagatcgacctgcgtatctcgtccatgccgacgatctacggcgaaaaggttgttttgcgtttgctcgataaatccgggcatacgatcacgaagcagtccatcggccttgagggcacagatctgcaaaagtacgatgcactgctcaaaaacagcagcggcgtgattttgattgtgggcccgaccggttccggtaaatccacgacgatgtgcgccatgctacaggagcttgcaaatgaggaaacgaacctcatgacgctggaggacccggtggaatacaacattccgggcgttaaccagtgccagatcaatgaaaagaccggcatgacgtttgcgacaggactgcgcgccatcttgcgtcaggacccggatgtcatttccgtcggtgagattcgcgatggcgagacgggcgtcattgccattcgtgctgctattacaggccatttggtgctttccaccttgcatacgaacgacgccgtttccgccatcgaccgcctggtcgatatcggcgtagagccgtacctcatttccagcgcgctgcgcggcgtcatttcccagcgccttgtgcgcaaggtctgtccgcactgcaagaaggcgtataggccggaggcggaggagcttgccatgctcggcctgccggaggacgccaacgtgcagttctaccgcggcgagggctgtcaggagtgctaccacaccggctacaagggtcgccgtgccgtctttgaaatcttcatgctcaacgggcgcattcgccgcatggttacagaaggcgcaaagtacgatgcgctttcaagggcagcagcggagaataattttgtcacgatgcgcgaaaattgccgtaaccttgttttgcgcggcgagatcagcgcagcggaagccgcgcgcgccatcaattccacagcggattgacattctgctgaaaatctgttgaaaacttgctcataactttcggaaaggacgcagtcgccgcgtttcggcgatggttttaatatgcttgaaatcagcgaaatcatcgcgcaggcgcagcaaaaaggcgcttccgatattcatattgtcaccggcctgccggtgaaatgccgcatagacggcaaggtgcagaacctcacggagaaagtcctcacgtgggaagactgcgaatactacgcaaaatgccttgcgggcgaccttttccacgagatcgaatgcatcggcgagcttgatttggcgcggacgtttccgtgcggagcgcgaaccagaatcaatctgttccgccagcagggggcggtttcggcggcgatccgtattttggcggataccatcccggagatcgaggcgctgaatttgccgccggtcgtttccgaattcccggagtaccgcagcggcatcattttagtcacgggtgaaacgggttccggcaaatccacgacattggcggcgattttaaatcgcatcaaccatacgcggcgcagccacatcatcacgctggaagacccgattgagtacatctacgagccggatcagtgcatcatcaaccagcgcgagatcggcaaagacaccagaagctacgcagacggcctgcggtctatcctgcgtgaggacccggacgttatcctcatcggcgagatgcgcgacctcaataccattgagaccgcattgacggcggcggaaacgggccacttggtcttcgccaccctgcacacaaactccgcagcagattccgttgaccgcatggtgaacgtgttcccggaggggcagcagcggcagattcgattgcagctttccactacgttgcgtgcggtgctttcgcagcagctgttgccgaagcgcgcgggcggccgggcggcggcgtgtgaagtcatgatggtgaacagcgccatcaagaatttaatccgcgagggtaagaccccgcagattgacagcttcattaccatgaacgcgcaggacggcagcattacgatggataatgccctgctgaaaatggtgcgcgagggcaccgtaacgtatgaaacggcgctcggctacgccagagatcgagaagcgttttccaagggaagacgcggctgaatttaggaagaaagcgagggagcgggtttgacgacctataaatacaaagggctttccccggacggcgcaaagctttccggcgtcatcaaagcgtataacgagtttgaagcggtcgcgcagctgcgcgagacctgctccgtcatcaccaaaatagaagaagtcaaagagacgcagagctggaacaaacagatcggcacgaagaaaatcaaagacaaggagcttgccatcatttgctcgcagttcgccatcattttgacttccggtctgcccattgtgcactgtgtggagatggttgcggcacaggcgcgcaccaaagagctgcaaaaaatgctgaaaaaggtcgcagaggacgtctccggcggttacagccttgcgcaaagctttgaaaacaacgctacgggctttccgaccacgtttattgagaccatacgcgcgggcgaacagtccggtacactggaagaatgctttgaaaaactacataaatattacgataaaactgctaaaatgaaagcgaagatcatcagcacgctcacgtatccggcaattgtcatttgcgtcgccgtcatcgtgttcatcatcattatggtggtagccgtgccggcgtttacaagcgtgtttctggagctcggtaccgagctgcctggcatcacaaaggggctcatcgcaacgtcggattttctcacgaactactggtggtcgcttattttgattgtgctcgcgttcttcatcggcaggcttctgctgaaaaagaacgaaaaggggcgtgcgttccttgcggaaaacaagctaaagcgctcaccgctccaaaaaatgcacagtctgaacgccgcttcgcagtttgcaagcaccatgagcaccatgctcacggcgggcttgccgattacaaaggcgctggaggtcacggcaaatgtggcagataactacatgttcgcggtgtccatccgcaaagtgcggcagggcgtggagcagggccgcagtctggtggactgcatgaacgagatttcgtattttccaaagctgctcaccgaaatggtgggcgtgggcgaacgctccggcaacatggaagaaacgctcaccgtcatcggtgattacttcgataacgaggtctcggtgttcacgcagcggctgctttctatgttagagccggccatcaccattgttttggcggtcgtcaccgtcattttgctgctggccgtttacctgccgatgtttaccatgtatggcagcatcgtttgatttatttcgctgtaccccgtcggcgatccaacccgaaccggcggaatacataaatttcgatggtgaaccccgaaaagtacgtttttggggcgagcaaaatttcaatgaattggagaatggttcctatgatgaacaaaatgcgtaagatgaagaataagaagggctttacgctcatggaaatgctgattgttgttgcaatcatcgcgatcctcattgctattgctatcccgacctttgcttcttctctgaataaggcaagaattgcgactgacgaagccaacattcgttccggttatgcttccgttatggttcgtgtacttgatcctgataatgctcttgctgctgcaaacacaacggttacttacacgcttaacaaggatggttctgtgtccacagcggatgaaacaaaggataattacacctgccagggcaatcagactcagacaggtacttctatcggcggtgttgctatgacaactggttggaagaagggtgacaccatttcctataagtacgacaatgctacgggcaaggttacaatttctgttggcgccggcaagtaatttctttatctaactgcaaattaacacaactcattttaaatgaaccagatctattgaggggccgggggttgcggctcccctatgatctgttcttttgatttttactttaggttttcataaaaaaggggacgtagtatgctttgggtttcacccgctctcacggtttatatttgtgtgcttacggggattctcggcgcgtgcatgggaagctttctcaactgcatggcgtggcgtatcgtccacggcgaatctgttttacacgggcgctcgcactgcgacgtctgcggccacgtgcttggcgcgggagatttaattcccgttttaagctacatcatgcacaaaggccgctgcaaatactgcggcgcaaagctctctgcgggacatgtctttgcggaagtgttaacggcgcttacgtttttgctgctcgtgctaaaatatgatatttcgctccaagcccttgaatacattttgctggcgtgcctgctgctcgccgctgcattcacggatttggaggggtatatgatcccggaccgtttcatcgtgacggggatcgtcgtgcgtgttgttttcctgtttttgcaggggaacgtgctcgaaaacctcatggatgcgctgctcggcggcttcaccgttggcggcggtttactgcttatcgtgctcttatacgaaaaagtgcgccaaaaggaagccatgggcggcggcgatattaaactgctgttcctcaccggcctgtttctcggctggcagcggaacattctgtgcctgctcatcgcgtgcgtgctcggcatcgtcttcgcgtttattttcccggaaaaacgtaccacagaagacggggcagaggaagaagacggaaagctttttccgtgggggccgtccatctcggcggcagcgattctcacgctcctttgcggcagcgagatcatcggcgtgtatttgagcttattttaacggaaagaacaaaagctttacagcttggcggatagggataaagaagaaagcgaggtgtctgtaccatgcccggacaaatcacggcattcgacattggtgagtgcatggtaaaagccgcatgtcttacaggcggcaaactgaaaaaggttatggcgaaagaattgccggataatatggtttccggcggcgaaatcgtctccatggacgccatggcggattttatcaaggaaatggcgaaagaaaacggcatctcccgcggtgcggcggcggtcattctgcccggcacgctggtgttcacccgcaacgtgaccgtgcccgccatgacggacggccaactgttgtataacctgccgtttgaatttaaagattacctgacgcaggaaaagaataagtattatttcgactacgccgtgcaggatacggtgaaagacgaagagggcaatgtgaaagaattgcagcttttcgtttgcgccaccttaaaaagcaccgtggaagaataccgcgccatgctgcgccgtgcgggcttcaatttgaaggtcgccatgccggaggaatgcgcctacgctgcgctgacggaggattacatgcagcgcacaaatgcgcccgcgggcagcgattactgctttgtagacctcggccacaacggcatccgtatgcacattttgcaggacggcaatttcaccacgaagcgctccggcgacctcggcctgcgcgaccttgagcagacgatttccgatgtgcgcggcgtggatattcacatggcacacgcacacattttgtccgattacaacgacgtgctttccgaagacgtgagcgccgagcttttcaaccgcatggcgatcgaaatcatgaaggccgtcaacttctataattacaataaccgcgagcgctcgctccggagaatttatctttgcggcggcggtgtggcggtagatcagatccgcgcggccatctgccgtgtgacggatctggacgtacataacgccgaggagctgcttcctcagcacgacgcattggaagcggcgtggctttacatcaaagcgatcggctgcgcgctgcaaaagtaaggaggcgttggaatgaagcttgaactcggcatggggaacggcgccaaaaagcccgtaaaataccccaccaaaagaaccgtcaaccttgcaaagcgcgagtcgcactcccagagcgtcatgacgctttctatcggcacggcggtcattatcgtgcttgtggtgctcgtcgtgaaattcggtgtacttgaccagcttgcgcgccaaagtgccgcagaaagtgcttacaacaccgtgcatgcccagtataccgaaatgcagagcgccgtggagaaataccccgaggtcgaagaggagtaccgcacctattccagaaaatggatgcagcaggaggattccggcgcgttcgtttctgtggacagacaggaagtgctcgacctcatggagaactacctgcagccctacggcactataaaggccgtcaccatttcggacgacgtgatgattgtttccatgtccggcttgaatctgcaggagatttccgccatgtttgagattttacagcagcagcccattgtaaaggctgctgaccttacaatcgcctccaccgaaaaaacggcaggcgaagacctcgatttctccgtgacgatcacattacagccggctgacacggcggaaggggaggccacagcatgaaaagagcctttacaacgcgcgaaaaagtgatgctgctcgtcctcaccgtgctgctcatcgtcatcgcatattttaagctcatcttggagcccatcaacaattccatcgacgagtatcagtccgaaacggccgcggagcaggacgagattttgcagaacaccgcgcttttgacgcgcatgagccagatgcagaaggagctcgaggaaatctatgccgcgggcgaccccacgccgattccgaattacgacaattccggcaagctgctcgttgagttgaacagcattctttcggcttccgtcgattattcgctggatttcggtcaggtctcggcactgaacgatggctacatcatgtgccgccccatcaacatgacctttacaacgaacacctacgccgaaacgcgcgccatcattgatgcgctgcacaacagcgattttacaaaccaaatatcggacatcagcgtgcagtttgaaaattccggcagctccggcaatgtgcaggtaaacctgtatattacgtattttgaacttcaaaaatagctggtgcaacacaggccggaagctgttttttgcttgccggttttctgtgtttaaaaagacttataccgttttacggtttccatatttttctcaggagcaaaacgcatgaatttttcacaggatatgaagagcttgaaaaacagaagaaaggggaaagccggctttaccatgtccgagcttttgattgttgtggccatcgtcatcgtgctgtttgccgtggcggttctctcgcttgtgacgattcaaaagaacctgcgccaaaaggaactcgacagtaaagcggagatcctttacgttgccgcgcagaaccgcatgtccgagctgcgcgccggcggctacgaaagcctttatcagtacgatgaaaacaaggataacggcgttgcaaaggttggtctcattccgctggatgctcccgaagaagatgcggaagacgccatcacaaaagacacgctctgctacgttgtttccgcagaccgtgtgacggtcggcaaggcggcagcttccgttctgccggaatcttccgtagatgccgagctctggaacaaccactgggttattgagtacgatcccgaaagcggcagtgtgtacagcgcattttacagcgaagagaagatcacaagcggcgatgcctccaccacgctgcccacatacttaaaccgtatgcgtgtgcgccagacccgcctgcacaacggtgcgaagatcggctactacggcggtgcgcgtgtgatctccggcacaaccgacactctaaagccggacatctccatcgataaccgtgagaagctgacggcaacgttctactgcaacaacccctatgccgatgagctgacgttcaatatcaaggtttcggacggcaagaacgaatatgtaaaggtcgtaaaatacagcgagcttcgccagctgaacagcaaaacttggtactacacgtgggttatggatagcttggaaagcgaaaagacgcgcttctataatcagaccgaccataagcttgcgtgcggcacagacatcaccgtcacgctttccgtagaaagccaaaacgccaatgtggacggcaaaagctacacccgcaaaacgaacagcctgttccgctatgccgaggacaccccggtcggcacggcgctcatcgcctacggccgccatttacagaatttggacgaggcctcccatgtttccgatacgattacccgcgccgtgcaggtcagcgacctttcctttgcggatgatactgccgacaacgaagactggtattccttttaccgcgacgacacctttacgcccatcacaaataagtatctcaaaagctatgatggctattccgaggtcgataacgtaaagctgtattcttccatttcaaacctgcatatcaaaaaagctgcgcaaaacggagatgcaggtctgttcagtacatttaacggtgagatcaaaaacgtgacgcttaccggcatgaggattgataatgtcggccagaacgtcggtgcgctcatcggttctgtttccgataccgtgaaaatcacaaatacccgtgtatacctcagctccaaaaaaggcgacctcgcagatatcgaaacggtcgattccccggaaaaagtgaagccgtggctcgagggtaaaatcgtcggcggacttatcggcatggtgacgaaaacgggcagcgtatccgttacggacagctccgcgtctacggtcattcgtgcagacggcggcgcagcaggcggcctcatcggtgccgtgtataatgcggcaacgataaccgattcctatgcggattgctatttgacggcagccagaacgggcggccttatcgcaaaggcagagggcgggtctgaagtagccgcaacgggaacctctatcaccttaaaggatttctatgcagcgggttaccaaacggcgaccgtcgatgctttcggcttagtaggcggctccaatgtgatcgccacaggcggttattctgcgtgtgtttacaatgttgaagaaaacgcaaaggtccattccacggtgaatacaatgggcagtgcctcaaacgtatattatctgacagacggcggtctttccggagacggcacaagcaagtgggaaaacgacaatcaaaccacgccgaaaacctataaagaactcagtgaatcgggctttgcaaaagaaatctccaaggcgttcacgtcctcctccggcgcggctacgtttccgtataacttgatggatcagggccttacgtattacacgtatccgcgccttgaaaagctgaaccactacggcgactggcaggcggagtttgaatccggcgcactggtttattacgagcgctacgaagacgaaacctacggcttctacggcgcgaacctttccacgctcaaaacgagtaagtttgtcgtcggcgacggctatgcgctggcgtatatcgaaaagaaaaatgcgcccgataacgttaccgtgacgtatgcaaacgaccaaacggcacaggtatcgtttaatagcgcaattgaaacgaccgacgacacgacaaatacgaagtattatctctatccgctctcaaaaaaggtcgtcaacaccgagtatatcgacaccgcagagccggatacattctaccagaagatcacgatagaagacaccgcaaacaacacgaatacggagtattactacaatccgcatttcgcaaaaacggtgacggtcaacgaaaataagccgcaggcgccggaaacggtctgcatccgctccgcccgccagctgtatgccttgagcctttactacccgcagtatgcggatgccgtaaaggacagtgtgtttcgtcaggaactcaatatcgattacagcaggtatgagtggacaaattatgacgttgtgcctgcaaagattaacacacaggcgccgattggcacaggggataagccgtttacggctgtgtataacggcggctgcaatacgatagagggaatttcctttaaagcaaagtccctttacatcggcatgttcggttatacgtcgtccgctgccgcggtgcgcaatgtgttccttgtcggcgacggcagtaacacggtggcctatgtcaatgcgcagggcggtaattcggcttccggcagtgcgtcgcgcgtcagcatgggcgtgctcgtcggttataaccgcggcacggtttcaaactgctcggtttccggctataccatggagtattacggttacagcgccagcacggcttcactcggcggctttgtcggcagcaactacggcaccatccgcaacagcgcttcggactgcccgtccattcgctttgcaaatacgaactctaacacctatgcgggcggctttgcgggcgtgaaccacgcctctatttcggattcctacgcgcttggcagcattcaggtgcgcggcgcgcgaaacagcaccgtgtgggtcgcgggctttgcggcgaacaacgccagcggcatgattcgccgcagctacagcgctacggcgctgacagcttccggcgatgcggagtcctacggctttgcgcataccggcggttcggcataccagtgctattatctggacggcggcacgtattcgtacagaggcacgctttatgcttacaacacctacacgaacgaattcgaagttaacgcggcgggtgagccccttacgggcagcgagctgcaaaacaaaacaatcaacaatttcgaaccggcagattgcacctataatgccaaagaaacgaccggcgatcattatatctacccggcagtcgtgcgcaatgcagcagggcagaccgtgcattacggcgattggcccgtgcagaaggacatcggtacgctcggtgtgttctactgggaatatgaagacagcggcagcaacagcggctaccacttcagctacgtgggcacaagccagggcaatgaaatttccagcgcaaacaacgacatcttaaagggcgattctctttgtgaagagcacgacgacggcggcgttgtaacgcattacggctacggctatttctatgcaaacagcaataatttggagacttcattaagtggtgctgtgaacttcaatgaaaacttcatgcgcgttgcagaaaatgcaaaagccggcgaagcactcggtaagcagatgcccggctatacgtttgtcgcatatgaaaccggtgaagacaaaatgtatttgaccggcaacaacgcaaacggcacatggcagctggagtacggcaacagaacggatgctaccgtatacgcctacaccgtcaacccgttctttgcaaactctatgagcctcgatagctccgaagtacagaacaaaatgacaaaaacaggtgacgtcaaacccggcgccaacggcaacgcttacgagattcgttccgtctcgcagctgcagtttatcaactggaattccggaaagcacaatacaaacacctccattgtgtctcagaaccaaggggattgggatacgtttaagaataaatacacgtatcaggtttacggcgatactcacagggtatcggaaagcggcaaagagctgtattggaatcaaacacacgatttgaatgcttcctcagaatacagtacacttggtaaggacaataacttcacgcctatcggaagcatgtatgataatgcaggcaatacagcaaccgctgatccgacaatgtcatattttgcttctcattatgacggacaggcatatacgatcaaaaatgttgaaattcacagcaatgcggaatgtgttggtatttttggtattacggtcggcgcaacggttaaaaatgtggtcgtatactcggatgaaggcaatgtaatcgaagctaaacaggatggtgagagctgctactgcgttggcggtcttgtcggctttgcggccggcagagacaatcctgcaagtgtatttacaaactgcacggtttccggctataccattcaggataaccatgcaaaagacccgggttggggcggcggcagtgtcggcggtcttgtcggcatgacaaacatggatattacaaactgctccgctgtaacagatattatcatcaatatcggctataatggcccttatcaaaatctgcgtgtcggcggtattgccggtgtttcgcgtggcgcagtgcgatattgttatgctggcggttctatgagaagcacagctaaatcttggtataagcactatactcagggtgcgaatatctggatgggtggccttgttggcggtattgtcatgcgaaacagcggcggcttagcaactttggttggtgatgtgagtcgtgtgctcaaggttgaaaactgctacagttatgttgagatgccaaaacgtggtaaagccaacgagcaaaatattataaagagtacgcaggcaatcgcctccaatggcgaaatgcaggaaaatttcgcgaatgttaaaaacgactatatcgagattcataactgctatgcacttgaatccgccgtattaaatacagatgattaccgcgaatatggcggtaaaactccctcaagttggtctaacctgaacctgaacatgacgcatcagggtttgcgggggcgtgagatcaagttgttcaatgattccaccccatacgtatcgtatgccgaaatgcagagcagcgaattcttgacgaaactgaacaagaactaccagtccggctcaagctataagagcttctccaccgtcaccatcaccgagcaggggcagaatatcgacggcaagtatagcttcccgggcaacgatacggcgctgcaggggcttaactatccgttcccgacggttctgacacagaccgatatcttcggcagcacagtcaatttgcattacggccgctggccgcgcatcggtctcttctgggaagaaaattcccagaagctcgacctgcttgcggatatcaaaacgagagctgaagacagcactttgaacgacaatgaagacggcaaggcgcttttgcagacacatttgcttgtcgccagcagcgatgtagatacgagcgcagagccgccggaaatcaagctgtacgacgaaaacagaaacgaactcacaaacgataaggccgcagcaacagtcagccgcattgcgtataatcgtgagaataactgctacgatgtcacattcatcgggcagaatgtcggcacggtcgtcgcagaggcgaagctcggcaattacatcgcgcgccttacaatcgaagttacggcatcgctcaagctggaggcttcttctacgaacatttcggtttattccggcgacaccgatacgatcacgctgaccgtaaaggacgcaaacgacaagcagctgcttgccgagaccgaaaagacgctcagatgggagattgctgtcgataacaacggcgtgcagcaggatgtcatcgagtgcagtaaggacgatatcaagctgaacgcagacggcacgttctccttgccgcttaccggctttgccgcgggcgaagccacggtgagcattacgtgcacatatccgtacggcgcggcaactgccgcggagcccgcaaaagaggtcacggctacgctgtatatcagcgctacaacaaagccaagtgatgtgcttggcctgacaaacggcagcgtctataaccagatttctctgccgcacacgccgaaaaaatccacgacctcctacaccggtacgaccgttgaatacccggaaaaccgccccgccatgcagggaagtgcgctgttcctctacgcaacggatgagtataccaatttgaaaggctttacggtcgatcaaatcgagatcaccgcaggggaaacgacctacgccgtgggtgaagacggcatcacgaccgatgaaaatcacacctacaccgatgaaaatcacacctacaaagtgacggtaagcgatcagtggacgacaaaaacgaacgacacgaagttccgatatcgcgccgtaaaggtggaatccgccgcggcaggcgagatcaccctaaagatcgtcctcaaaaacggcgacgtgacctacaacctcaccaccccgtacaccatcgcatcgaacacgtatacggtgaagttccttgacacaaagggcaatattcttctcacaaaaacagtcgattatggcaaaaagccggagctgaccgaggaggataaggctaaattgaaagccgatgccgagttgggctacacctgcacatgggcgctttctgaaatctacgcagatacagaaattcacccgacattaacgccgaacacctataccatcaagtttgaagccaacggcggttcgggcacgatgagtgctgtttcgtatgcttatgataagattcaaacaacggacagccttccgccgaatacgttcacaggaacatccacctttaagggttgggcggtagaagcggagggtgcagttcagtatacagacatgaactcaatcaagagcatcatagattctatggcaatggagaataagaccgaactcactctttacgccgtttgggaagataccgcagcaggcggcgagaccgttgaaccgtaaatcaacaaaaaggcaggtgccgaaaatgcaggcgatccgcagaaaactgaatagccaaaggggcgcttccatgctgatggcgctgctgcttatgctggttggcatcatggtgagcgcggtcatcatctccgccgccaccagcgccgccgtaaataaacgctcggaaaaagaacagcagcaggcctacctcgcggtcagctctgccgccgagctcgtgcgcgacgatttccaaagccttacgggccggtataaagatgttacgaccacggtgacgcaagcggatggaacgaccactacgaagaaagatacgataaaggccacatgtgcggtgggagatatgatcaatgacatcggcgcatggtttatagatgtgaacacgacgtccacttatgcaaagacctacacgttctccgtagacggttatgaagatgtatcggcagaaatccttgtatcaatcggcaccggcagtgacgcaagcagcaaggtgtataacctcactgcaacattcacaaacggtgtgggttccgaacacccctgccgcatggtgttgactatggagggcaaactggcggaggaaagaacctccggcgatgcgggctcgggctccacgcaggtcgtcacccaaacactcgaatggaataaggcaaagctgcaaaaggaggtaacgggttgaaaaagctgcgttcacaaaaagcggaaacactggtggaaacgctcatggccatcttggtcgtggtgctcgttatgctttttctctccaccgcagtttccacggcctccaaagtaaatgccaaggtacgtaaaaccgatgtggctttaacgtataagaatgccgtcaagggcggcgaaaccaaaacgctgaccattaaggataaaaacagtgccacaaaaatcatcaatgttcaagtcgatgaatacacaagcaaaaacggttacacgtattacagggaaagcaaagagcagggggcgggaacttgaagctgaaagataaaaaaggcttaacgctcgtggaaatgctctgcacagtcgccattttggtgcttgtcagcatggtgatggtgttgggtgtgcagctcggcgtgcgctcctacgcaaaatccgtttcatattcggaagcgcaggtgctgtgctccacgcttacgaccaccatcagcgatgagctgcgctattccggcacactgaaagtagacggcagcggcaacgttacgggctttttcagccagcagttcggcagcggcgattacaccgcgtttaccactacgccggaagggcatgtgcagcttggcggcaaggacattctgcccgcaaaggcgtacccctacggtattaaagctgaggtagaaagcttaacgtatgacggtgtttcctcccttttcacagtgcggctgagcgtaaaagacagcgaaaataaaaacacgctggccgaaaccacctttgaagtggaaaagctcaatgtgacgaccgaagacaccgcagagggccgcgcccgcgccgaagacatccgcaatacagaaaactgagaaacaccgcgccaaacggaatgctccgcaggcgcggtgtttttgcaataaagaatttgtatacgctttgttttttgaaaagtatgatttcatgcgatttttcttgcgatttttcttgcacgtaaaaagcaaatatgataaaatagaaaaacagtgtatttaaatagtgttctttattgtgtagaatagatagaattgctgctttttattcactttttgacgaatttgcagagaatatagcgaattctgtctttggcaagtcattctatcggtaaaaatgaaagtgctttccgataaaaaataaattgtgagacgaaacagaaagcgctgcaaggagaaatctatgagtttaaaggaaaaaatactcatcgcggacgattcggaaatgaaccaaatgctccttgaggaaatactcagcgataaatacgaatatgtcatggcaaaagacggcacagaagccgtcgatatcctcgaaaaaaacgaggatatcgacctcgtgatgcttgacatcaacatgccgaaaatggacggtttcggcgtgctggagattatgaatctgcggcattggatcagcgaggtgccggttatcatcatctcgtccgaaagcgatgtggatttcatccgccgcggctatgacctcggcgcttcggattacatcagcagaccgttcgatctgacggtcgtccgccgccgtgtcgaaaatacgctcatgttgtatgcccgccaaaagcgccttgtgcgccttgtggaggagcaggtctacgagcgtgaaaagacgaacaacacgatgatcaatattttgagccatgttatcgaataccgcaacaacgaaagcggccagcatattctgcatgtgcgcacgatgacggacattctcctgcgccgcttgattgagatcacggataaatacccgctgacggaaacggatatctctatgatcgcttcggtttccgcactgcacgacatcggtaagatcagcgttccgaaagcgattttaaataaacccggcaagctcgaccccgaagagtgggagattatgaagagtcacgccgccatcggtgactcgatgctgtccgacatcggtatgcagcaatccgaaacgctgatgaatctggcgcatgagatctgccgctggcaccacgagcgttgggacggccgcggctacccggatggtctcaagggcgatgagattccgatttccgcgcaggtcgtcgccatggcagacgtgtacgacgcgcttacaagcgaacgctgctacaaaaagtcgttcgaccacgcgaccgctattaaaatgattacaaacggcgaatgcggcgccttcaatccgcttttgatacagtgccttttagacgtgcaggatcagcttttcgagaacatgcacacagaccccagacgattcgattaccgtcaggaagcaaagcgtctttccgatgaaatgctcgagcaaaaagaacttatgcctaataaccgtgcgcacagcctgctcaccttcgagcagaaaaaggcggaattcttcgcagagcagtgcggcggtatccagtttgaatttgaccactggacaaataccgtacatctcaaagattggaatgcgccggtcgatcaacgagaaaaatccatgtatctgacggaatggaacgacgtttcgctgctctctgaaaaggattggctcgctatgcgtgaaaagctgaaagcaacaacgccggaaagaccggaagtgaaaatgattgtgcagatccccgttaacggtgaatatcgctggcagcgccttacggtaaaatcgctttggacaactaaatacaaaaattatgccggcgtgctcggacactttaaagatattcaggatgaaatggtgcggcgcggagaagatgtgctcgaaaagtgcacggaagacaacatagctcatcttttgaaagatttgagccgcgtgtttgaggttgtgcgccttgttgatccgaaaacgaatgagaaccttgagctggataaagacggcaaagtaatcactacgccgatacactgctatgaaatttggggcagaaacgagccgtgcgaaaactgtatttcttcccgctctctggaaggaaaagagtgggtcaccaagcttgaaatgcgtgacaggcaaatgtacttcgtgctttctaaacatatcaacgtcaacggacgtacctgcacactggagattgcttcgcatgaagacgaagcggagtgcacacgctgcggcggcgacaacgatgcgccaacgcgttcttcgtttatgaacttctaccgcgatgccctgaccggaacgtacacgagactgtatcttgagagtttccagtccaatttggaaagcgcagatgccgtggcaatcgtggatgttgacctttttaagcagattaacgatacatacggccaccctgtgggcgatgaagcgctgaaaaccatcgcgaatacaatccgttccggcatccgcggcagcgatacgctcatccgctacggcggggacgagttcctcctcatcttctccaagatcggcgaagaggttttctatgagcgtttaaagcagctcagacgcgccgtgcaggagacaaaattgccggattaccccgaggtgaagcttgatgtcagccttggcggtgtataccgcgtacacccgctctccgaagccattcggcaggcagacctgcgcatgtacgaaaataaagcgaaacacgcgaatgtaaatcatgcggcatgcagataggaattgcagaaaggtgacagattatgaagcttgaagaattatatcagaaaatcggcggcgacctcaaaaacgtgatgaaacgcatcccgaatgaggcaatgatcggcaagttcgtgcgcaaatacgcaaacgacccgacctataaccggcttacagcagctgtggaagccaaaaattggaaagatgctttccttgcggcgcacaccttaaagggtgtggcacagaacctcggcttcgaccgcctgcaaaaatcggcatccgctttaacggaggccgtgcgcggcgccgttccgctgacggacgaatcgctttttgaagaggtctgcaaagatcagaaggagatcgtggaggccatcgaaaagctcgattgatatgacttaacagatatgccggttctatggaccggctttatttcgttcagttccctgtgtaatgcggcggaacagtttgggggagaataggtcgcgcgctgcggcgtttccgcactcgtcaaaatggcgcgtgccggtgccgttctgcgcgagcgcaactacgtggtgccggaagacgtgcagagcgtgtttttcgatgtctgcgcacaccgtctcattctgcgcccgcaggcacaggtggacggcataacggcgcgtgatattctggctgagattttgcagcagatcaagcccggtacggaaaggtaagcggatatgtggaaaaacagactggcctatgggcttgtcctattgacggcagcagtgctgctgttcctatacagtaagccgtttttgctgacggtgctgatcgttttattgctgctcatggtgattaatggtgtgctcgttttacatgatgcgcacagcattcgcgtttctatgcgtgtccgccccggtggtcagcaaggcaaggacgttaacctgaacatcatcgtaaattccgataaaaagctgcttgccgcgggtcaatacaccgcgtccttaaaaccgcttgagggtcgcatcggcactaccgtcatcagtgcggtgtccggcggcaaattgcagcatattgcggtgggcggcggctgcgaagtggtagaactgcctgccgagcgaatcgaagatgaagtttaccgcattttgtgctgagagggggacgcgcatgaaacatccgcagaccgttacggtctacccggaaaaaaacgaaaacaaagcagcgtatctgctgtggcgctccctgcgcgcggccctgcttacggcgggcgcgctcatagcgctcatggttatctggaatgttgatttaaagggccttttcgtcttgccgctcggcggtgccgtcacggtgcttctgggctgcatcgcaggggattatctcggtgcgaaaaagcccctgccgtcggctttcgtcattttgcggagatttcgacgaattgattgtgaaaatagatggttttacaaaaaaagtagacaaatttttgatgatgtagtatactggcgttaaacgggagagcaagtcgatcttttgcacaaaaacaaataaacagctgaattttcatgttgtcacatgatgagttcagacaacaaaaaggagattttgaaatgaagaaagagcaaaaccggcattcccttcacctcatccgtcaaaacgttccgcagtttattttgctcgttattttttccgtgctgctgggcgtttccgtcatcgcggtgtctgttttgatgaaaatgttcctggacatcgccacaaacgcaagcgccatgccgctcaccacatgtcttatcatcgcggtcggcgttttgctcgtgctcggcatctcgcaggtcgttacgtctgttttgcagggcaagctttcctgccgcatggagctttctctgcgcagcgccatggtggagcacctataccgcacagaccttaggacgttcgacagcggcgcggcggataactacttcacgcgcatgacaaaagacgcggagaccctctcgaatttctattccaaaacgctcatcccgagcatctttttcgagagcttcacgttcgtcgtcagctttattttgatgttcctcctcgagtggaaactcgcggtcgtcatgatcgtcgtcgtgccgattttgattttcaccatgatccgcatctccccgaagcttgagatgaacagcattcagatcatgcagaacgaagacaaaaaccgcaatatcttacaggagtttttgagccagtacatgctgtttaagtcctacggcgtgctcggctgggtgcagaagcgcgtggggaatacatacgcgcaaaagcagaagtacgtcggcaaactcagcgttttgcagggcgccatcggttttctcaataacttcctcggcgtcggcatgttcatcatcgcgctcggcatgggctcgttccttgtcgtgcgcggcgaaacgaccgtcggcacgctcatcgccgttgtgaacctcgtcagcttcttctacggcccgttcctgcacatttcgggctggatggctgaggtcaacgaagtgaaggtctccacaaaccgcatcggcgagatcctctccatgcccaccgaaaatagcacacaaaccgcaaagcccgctgtccaaaatgcaggcagcgcagcgctcaccgccaaagacctctcctttgcgtatgacgaagaaaaagttatcctgtcccacgctgaaacgcaggtgcacacgggcgagatcgtcgcacttaccggcgaaaacggcagcggcaaaagcacgctcacaaagctgctcatcggcttctatacacccacgggcggcgaggtcgagctcaaaatcggcaataaaaccgtgcacggcgcggagattcggaattatttaagctacgattccggctttgtctccgtttttgcgggcacgctcaaagagaatatctgcatggatcagccgtttgacgagaagaagttccgcaaagctgttgaccttgctaaccttacggagttcgtaaacgaaaaaacagcggagtacgagatcgagccggagggcaaaaatctctccagcggtcagcgccgcaaggtcgcgctggcgcgcattttctacgatgaccgcccggtcttcgtgctcgacgagcccaccgcgaacctcgataaagcgtccgcagagggcatgtttgaggctctgaagcgggtctgcaaagacaagatttgcatcaccgtcacgcacgatgcgttcatctccgagaaatgcgatcgcgtgctgcatttgaataacaaaaaggtcacaggatgaccgcaatacgatttgcataataaggcgataggaactctgccactcgcaacgagcggtgggtgtggcttagctccgggcaattccgcccttgcggcaaggctcgtcgtagagaacgcctgcgccgagtggcttataaatcttgagcattgctgatgggccatttttaacaaaatttatcttttttacaaaaattcaaattttttcaaaaacctaattgacaaccgaaaaaatgtgtgctacaatgcactaaaccgttgaggaagagtgagtacgctttaggcaacttttctcacagagagtcgtggatggtgggatcacggcggaaagataaagcggaatggacttctgagggcgaacagaaaaggatttcccgagtatgtgagacggagtgtggctctccgtaaacaaaggtctgcgtatgatggtacgcgtaagagggtgtgtgtttcacataccaagccgggtggcaccgcaggaattttgatcctgtcccagcaagtgattgcagggacaggattttttgtttttcagggaggttatttcatgtttgtttacacaaaacgatggcgcagccgcgctgcatctgaaattttgaacccgcatttgaacgcattaaaacaaacctgaaaggatcgataaatttatgaaactcagaaacgtatttgccatgatcaccgctgccgctatgaccctcagcctcgccgcttgcagcggtcagagcacagcttcttccacgtcctccgcgtcaagcgacgcttcttcgtccgccgcttccgaaagcagtgtgtcgagtgaaaagagcaccgcaagcgaagaatcttccggcacatcgtacaccatcggcatctgcaactacgtcgatgacgcttccttaaaccagatcgttgagaacatcaatgcacgtctcgccgagattgaaagcgagcagggcatcacaatcaacgtgaagtacgacaactgtaacgccgacgcgaacgtcatgaatcagatcatcgcaaactttgcagccgataacgtagatctcatggtcggtgtcgcgaccccggtcgccatggcgatgcagtccgcaaccgaagacagcaaaacgcctgtcgtgttcgccgccgtgtccgacccggtcggcgcgggtcttgtcgcttcccttgaagagccgggcagcaacgtgacgggctcctccgataacctcgataccaactccgtcatgaaccttatcttcgcccagaatcccgatgccaagaagatcggccttttgtacgacataggacaggattcctccaccgccgccatcgagcacgcaaaggcgtacctcgacgacaaaggtgttgaatatgtagagcgcaccgcaacgaccgccgaagaagtcgcgctcgccgcacaggctctcgtttccgacggtgtagacgccgtgttcaccccgaccgataacaccatcatgaaggcagagctcgctatttacgagacctttgccgacgcaggcatcccgcactacaccggcgccgattccttcgccctcaacggcgcgttcctcggctacggcgtcgattacgcaaacctcggccgtgagaccgcagatatgatcgcttccatcctcaccgaaggcaaagacccggcgaccaccccggtcatcacgttcgacaacggcaccgcaacggtcaacaccgaaatctgcgaaaaactcggcctcgacttcgataccgtctccgaagcttttgccccgtactgcacgagagtggaggagatcacgaccgcagagagcttcggcgatctcgagtcttaatttaaatctctcaaaagcttatcctaccccataagctttcaaacacttcatactaccatacttcatcaataccttacttacccataagaatgcaatcgccgctgccatgcacccggttttcgggcgcgtggcttcggcatatcaccacaaatctgcaaaacgaggagtttttgtatgtctttcgattcaatcctgacccttgggcagacagcgctggagctcggtctcatcagctcgctgactgttttggcactgtttttgagctattccatgctgaacgtatgcgacctttccacagacggttgcttcacgctcggcgcggtcgtcggcgcgtccgtcgcgctttccgggcatccgtttctggcaatccccgccgctatggcgatcggcatggtctccggcttcgtcacggcgcttttgcagacgaaaatgggcattgatagtctgcttgccggcatcatcgtcaataccgcgctttattccgtcaacatcggcatcatgaacggtgcgtcgcttctgaacctcaataattccgatacggtcttcaccaaaatgcgttcggtgctcgaaaacacaccgcttgcggggcaatataagcttatcgtcatcatcatcacagttgtactcgtggcggttgttttgggacttttcctccgcacacgcctcggcctcgccattcgtgcgacgggcaataacccggacatggttcgctcctcgtccatcaacccggttaaaacgaccatcatcggcctgtgcatttccaatgcgtttacggcgctttcaggctgcttgctcgcgcagtcgcaaaagtctgtcagcatcgatatcggcaccggcatggttacggttgcgctggcatcgctcctcatcggcggcgcgttcttcggcaagggcaaaattccgctgcgtatcttcggcatggtcgtcggcgcgttcgtgttccgccttgtgtataccatcgcgctgcgattcaacctgcccgcgttcatgctcaagttcgtctcgtccgttattgtcattctggcaatctccgggccgtacctcaaaaaacagcttccgtatctgaagcgccgtttcggaaaggagcgcacccatgcttaaactcacgcatatctcgaagaccttcaaccccggcacggtcaacgccaaaaaggcgatcgaagacctcagcttccacgccgcaaagggtgatttcatcaccgtcatcggcgcaaacggcgcgggcaaatccacgctcttcaacgctatttccggcagctttttcacggacagcggcaagatcgagcttgacggcaaggacatcaccttcatgccggagtataagcgtgcccgcagcatcggccgcctgtttcaggaccccatgcgcggcagcgcaccgggcatgaccatcgaagaaaacctcgcgctcgcagcggggcacggcggttggctcagctccatctcccgcaaggacagacaggcgtttcgcgaacgcctctccctgctcggtatggggctcgaagaccgcatgacccagcccgtgggtttgctttccggcggccaacgtcaggcgctcacgcttatgatggccacatataacccgccgaagctccttctgctcgacgagcacaccgccgcgcttgatcccgccaccgccgaaaaggtgctcgagatcacgaaaaacactgtggaggaaaaccacctcacgtgcatgatgattacgcacaatatgcagtccgcactggagctcggcaaccgcaccatcatgatgaacgccggtaagatcattctggacgtcaccggcgaagagcgtgcccacatgactgttgccgacctcctcgaccgcttcaagcaagccgccggcaaagccctcgataatgaccgtatgcttttgagcgaagcagagtaaaatttgaaatcgaaagacaacaaaaagcagatgccccgaatccacatcgggtgcatctgctttttctattccaaaacggcggggatatccgccgtcgttcctttacggatggtgatgcttttttaatacgatttcccaaatctttatatgtaaagcgttatttttcttcgttttccggcgcaatctccgcttcaatcttatccaaacggcggttgatcttcttttggttttccagaacaaggtcgagctttttgtgcagatcatcgatgatgagctcgctttttaagttgatcttatagtcattctctgcacgctgacggtcttttgcttcttggcggttctggctcatcatgatgagcggcgcttgcacggcagcaatgcacgaaagcacgaggtttaatagaataaatgggtattcgtcaaatgctctcgaacccaaaacgaggtttatgaccatccaaatgaccatgacggcgataaagctgaaaataaacgcccaactgcccgcaaagcgcgccactgcgtccgcggcacgctgcccaaacgtcatgtgctcgtccttgtctgcgttttttgtgacttccgttgcaatcagctgatggatcagttcctcatccgtgaattcctcgtccgtcacatgtaaaagctcgctgataatttggttgcgtttcgcaccttttttcatagtaaacttacctcttatcccaatactcttcgccgcatttcggcgttatctccagtctattacaaaaccgcgtgcgttgtcaaccgcaaggtgtaaaaatagtgaaaaaacacacattcgcggttttgccttgcgaatatgcgttttgaaattcaataagctttagtgcgtcagcgcttgccgcgcggctttctgccagccattgtagcgtgcttcgcgctcggtattatccatctccggtgtgaagcagctgcggtgcgtattcgcaaagatcgtctccgggtcatataatccgcaggaaaaccttgctgcgcacgctgctcgctctctctggccgaagcgatgagggagacgtcctctttcagccacgtgatgacgcgcccgtgtaattcaaattgccctcgagcacgtagttcacctgcccgttgaggccccatgcaaggctcatgccaagcgcgccgtagctcatgccgcctgccatgatgatgtccaccacattgcggagcagcgactagcttttctttaggagttcctgcacggtcattttattcacctcgtaaatacgcctttacatcttcttcaatcgggtcatagaggtcgggcttcacgccgatatatttgcacgcttcattctgtatgactcgtgctttcgtcgttttcagcgaaaaaatgggactaaaacgtccgatagggatattgcaaaaccaaacaagcgacttttacagcttattttgtataagcgtcacggcaaggtggtaggggataccctgtttttcgagcggcttacgcaaggtgtcaccaaagaagcccatgcgcacaggtctcatttctaaaaaagcgcctgcttttacacacggctcttgacaagcgaaagaagtagacgtacaataagcttgtaagtttgttttgactaatccaaaacaaagtcgttagggtgcaaaaacgctgaaacaaaaggagtgcgtagaaccgaaacggtaatgagcagcctttatgggtgcttcccgtgccgcacgctttgttgtctgtcctcgtgtaccgtacagagtgggaaacagagaatacctctggcacgtctaattgttcctataagcgcaatgtaagccgctgtattccaatgctgcggaaagagaaagttatgtcgaaagtctaaatggagcaatttcgtctttttggttcaaaaattgccaaaatgtttcttttgagctgtatgtacatcgtatgcgcgtctgtgctgaaaccgcaaaagccggcatgaaacctgtgattgtttaaactaaccgattctgttttaacaaattgtccaaaatggtattgctaacttgcaggttgttttttacaaataatagaaaattgtgttttttgtgtgaaaactgttgaagttaggtaaaaatcgtgctattcttttgctagaacaaacaaggtggtgaatgaatatgaaaatgcataagcattttgcaaggcttaccgttttgttctttgcactgactctcatcagtggacacatgaaaaaataattttatgagccgcatggttaaaatgcggctcgcaatacaggaggtatttttatgaattgggcaaaaatcggtcttttcgcagcaggtgttctgtttggtaccgccggcatcaaggtgctcggcagcaaggacgctaagaaggtctacaccgagaccactgcagctgctctgcgtgccaaggaatgcgtcatgacaacggtcacgaccatcaaggagaacgcaaacgacatcctgaccgacgctaaggagatcaacgagcagcgcgctgccgatgctgccgcagaggtcatcgaagatgcagcttgcgcatgcacggaagaaacagcttccgcggaagaatccaccgaagcttgatcgcgggtctatcccgggtctgaattaccggagagccgccgaaagcggctctcttttttcgttcatccgctctgtttttcggagcttccaatatattgttgcatagaaggataaagttatgaagtgtaaaattctgcatgaagcgcgcgggcacatgcgtgtacatctcgtctgcggccgtatgacgctgaaagaagccgatgttttagagtattacctgcgcgccgtggacggcgtaaaggaagttaaggtctacgaccgcacacaggacgccgtcatcgtctatcaaaacgaccgcacatcccttattcgtgcgctcgcgacattctcgttcgcaaaagccgaaagcatggagcttgtgccggatcacaccgcccgcgcattgaaccgcgagtttgaagacaagctcgtcttcacggtgctgcgccgcgccatggctaaaatgttcttcccggcgcccattcgcatgatgcttgccatcatccgctccgcaaagtacatcaaagagggcgttaaggcgctgctgcacggtcatctctccgttgctgtgcttgacgccacggctgtcaccgtttctcttgtgcgcggcgatttcgatacggcaggctccgtcatgttcatgctgcgcctcggcgagattctcgaggagtggacgcacaaaaagtctgttgccgacctcgcgggcgccatgtccctcaatgtcgataaggtctggctcaagacgaacggcaccgaggtgctcatgccaatcggcgacattcaggcgggcgaccgcatcgttgtgcgcacgggcaatatgattccgctcgacggtaaggtcgtcgagggtgaagccttggtcaatcaagcctctatgaccggcgaatctctgccggtgcagaagtccgccggcagctacgtgtatgccggcaccgtcgccgaagagggcgagtgcgtcatctgcgtcgaaaaagccatgggcggcggtcgttatgaccgtatcgtccgcatgatcgaagaatccgaaaaattgaaatccaccgcagaagacaaggcttcccgccttgccgataagcttgtgccgtacacgcttggcggcacggcgctgacctatctgctcacgcgcaacgtcacaaagatgctcgccgtgctgatggtcgatttctcctgcgcgttaaagctctccatgccgattgcggtgctgtctgcgatgcgcgagagcagcgcacaccatatttccgtcaagggcggccgtttcatggaggccgttgcaaacgccgataccattgtgttcgataaaaccggcacgctgacgtacgcaacaccgcgtgtcgccatgatcgaaacgttcggcgaccgtgaggaaagcgaaatgctgcgccttgccgcctgccttgaggagcattacccgcactccatggcaaacgctgtcgtggccgaagccaaggaccgcggcctctcccacgaagagtaccattctcgcgtggaatacgtcgtcgcgcacggtatttccagcactgtggagggcaaaaaggtcatcatcggcagcgcgcacttcgtttttgaagacgagggctgcgtaatcccggagggcgaagaagcgaagttcaacgcacttccggccgagtattcgcacctttatctgtgcatttccggtgtgctcgcagctgtcatctgtatctccgacccgctgcgcaaggaagcaaaggacgccatccgcgctctgcacgcttgcggcatcaagaaggttgtcatgatgaccggcgataaccgcaagaccgccgaagccgttgcagcagaggtcggcgtggacgagttctacgccgaagtgctgccggaggataaggcgaacttcatccgccgcgaaaaagaaatgggccgcaccgttatcatggtcggcgacggcgtgaacgattctccggcgctgtccgaagcaagcgtcggcgttgccatcaataccggcgccgccattgccagagagatcgcggacatcaccgttgcggcaggcgatctctatgagctcgtcaccctgcgtcagctcagcactgcgctcatggcgcgcatccaccgcaactaccgtttcatcgtcggcttcaacctcatgcttatcctgctcggcgtaggcggaatcatccagccgactacctccgcactcctgcacaatatgtccacactcggcatcagcctcaaaagcatgacagatcttctgccggaaaaagcagaggaagagtaagaaaagaagcttcccgtaacggtggtcaaaagttttcgccggcctttttcaaaagactgcgggtacttagggtagcggcctaagctgctttcatcagaaagcgaaacctctttgcctacataaaattaggaaggttgatttgaatgtccgggggacattcaaatcgtagggaacccggttgcatgggttcctgaaagggcggtcaatgaccgcccttttttacatccaaacccgcgctttgccgcatcgctccgcggcgccctttcacgctttattacacaatgggtaaaagggtacaaaaagaaatttaaaataaagcgcatttactactcgacaagacgccaacttcggtgtatactggtagggtgcttgcggcaggaaccgcaaaaacgaacacaatatcttgtggttacgcataaatattcaatataaggaaaattatggaaactgattatgaaaaccaaaggggctggaaacatgcagctcccgcgggcggtatgaaggagcggtaaggaacatgaagatcattaagagaaacggctcggaagcagcgttcgatatcactaagattatcgtcgctgtctccaaggcaaataaagagatcgacgagcgtcagagacttacgaacgaacaaattcgcacaatcgctgcaaatgtcgaaggagcgtgcgtcgccatggggcgtgcagcgtccgtggaagaaatacaggacctcgtagaaaagcagatcatggggcagggtgcgttcgatgtcgctaaggagtatatctgttaccgctatacgcgttcgcttgcgcgccgcgccaataccaccgataaccagattctcagccttatcgagtgcaacaacgaggaagtcaagcaggaaaacgcgaataaaaatccaaccgtaaacagcgtccagcgcgattacatggccggcgaggtctccaaagacatcgcgcgccgcattttgcttccgcgcgaaatcgtcgaagcacacgagcagggcatcatccatttccatgatatggactatttcgcgcagcacatgcacaactgcgacctcgtaaacctcgaagacatgctgcaaaacggcacggtcatcaccggcacgctcattgaaaagccgcacagcttctccaccgcctgcaacatcgccacgcaaatcgtcgcgcaggttgcaagtaaccagtacggcggccagagcatcagcctcgcacacctcgcgccgttcgtgcagatctcccgcgagaaaatccgccgtgaggtcgaagtcgagatcggcgagcttggcgtttccccggatgaggcccaaatctccaaaatggtggagcgccgtctgcgtgaagagatcaagcgcggcgtgcagaccatccagtatcaggtcgtgactttgatgacgacgaacggtcaggcgccgttcatcaccgtgtttatgtatctgaacgaagcgaaaaacgagcgcgaaaagcgcgacctcgccatgattatcgaggaagtgctgctccagcgctatgagggcgtcaaaaacgaaaagggcgtgtgggttaccccggcattcccaaagctcatttatgttttgcaggaggataacattacccccggcagcgaatactattacctcaccgagcttgccgcaaagtgcaccgcaaagcgcatggtgccggactacatctccgaaaagaagatgaaagagctcaaagaaggcaactgcttcccggtcatgggttgccgcagcgcgttaagcccgtggaaggatgaaaacggcaactataagttctacggccgcttcaatcagggcgtcgtcacactgaatcttgtcgatgtcgcgctcagctccggcggcgatatggaaaaattctggaaggtcttcgatgagcgcctcgacctgtgctatcgcgcactcatgtgccgccacaaccgcttgaagggcactttgtccgacgccgcgccaatcctctggcagtacggcgcaatctcccgcctcaaaaaaggcgagcccatcgatgcgcttctctacggcggctattccaccatttcgctcggctatgccggtctgtgcgagtgcgtgcgctacatgacgggcaaatcccacacggaccccagcgcaacgccgtttgcgctcgctgtcatgaagtacatgaacgctgcgtgcgaaaaatggaaggcagagaccaccatcggtttcggtctgtacggcacgccgcttgaaagcactacgtacaagttcgcaaagtgcctccagcgccgcttcggcatcatcccgggcgtcacggataagccgtatatcacaaacagctaccacgtccacgtcaccgagcatatcgatgcgtttgaaaagctccgcttcgagtcgcagttccaggcgctttccaccggcggtgccatcagctacgtcgaggtcccgaacatgcagaataacctcgaagccgtcctgcagatcatccgctatatctacgataacatcatgtacgccgagcttaacaccaagagcgattattgccagaagtgcggctacgacggtgagattcagatcgtcgaggatgacggcaagctcgtctgggagtgcccgaactgcggcaaccgcgaccaggataccatgaacgttgcccgccgcacctgcggttacatcggcacccagttctggaaccagggccgtaccgccgaaatcaaagagcgcgtgctgcacttgtaattaagtcaaaatcaagaataaacagtaccgcacagggcaggcgctttgtgcggtatttcatgaatagaggaaaccatcatgaattacggtgagatcaaaaaaaccgacatcgcaaacggcatcggcgtgcgcgtcacgctgttcgtctccggctgcacgcgccactgcaaaaactgcttcaacgccgaaacgtgggatttcaactacggcaagccgtttacaaaagaaacggaagacgaggtgctcgcagcccttgcacccggtttcatcaacggtttaactttgctcggcggcgagcccatggagccgcagaatcaacgcgctttggtgccgtttctgcaccgcgtgcgcgaaatatatcccgaaaaggacatctggtgctattccggttccaccctggagaccgatatgctgaaagacggcggccgcaaccgctgcgaggtcacggacgaattcctgtccctgctcgacgtgctcgtcgacggcgcattcgttgatgaactcaaagacatttccctgcgctttcgcggctcgtcgaaccagcgcatcatcgatatgaacaagacccgcgaaacagggaaagttaccctctggaacgcgaaaccgtaaaaagtaaacgaaaacgccgctcgactgctgtgtttagaacagtgccgggcggcattttttattttttcacacgcgcagcaacgcaggaattcaaaataagttagaaatcgctaactttttctcttgacattttatattgccaaggtatataatcaagatacccccaaagggtatatgaaagtcttctctcacaagaactattttcacaaaaggaagcggtttaaatgcgtacatatattttgaatgcgaccggcacggacatcagccctgctacgatcatcatctgtgtggtgattgcggctatttgtatttttgcggtcatcagctatcgcaaaaaattgaagaacggctgctgcggcggtggcggcgatgaagtgaagcacgtcaagccgcaggatacgaacgtgaacgactacgaccacgtttaccgtatggacatcgagggcatgcactgcaaaaactgcgccatgcgcattgaaaacgcgttcaacgagcagccggactgcatggcaaaggtcgacctcgccggcaaattcgctcgaatctacacaaagaagcccgtcgaagaagtcgttttgaagcagaccgtctggcacgccggctacgagccgaaaaccgtcaccgtcgaaaaataagacggaattgaaattcaaagaaaagcgtggtatactctaagaaattcccgaaattatagaagaaagtgatgatagagtatgaaaaaaatcgccagcttttccgtcaatcatgataagctcaaaaaaggcatgtacgtttcccgcatcgacggcgacgttgtaacctacgacctgcgcatgaaggtgccgaacgccggagattacctctcaaacggcgcgctccacacgttcgagcatcttttcgccacgtatgcgcgcaactccgcgttgtccgattccgtcatctacgtcggccccatgggctgccgcacgggcttctatttcctcctgcgcgacaatgtgagccgcctagatgccctgcatctcgtgcaggaatccttcgcgttcatccgcgattttgagggcgagattcccggcagccgccgcgaagagtgcggcaactacaaagaacacgacctcaagggcgccaaagagactgccgtcgatatgctcgagatcctcaaggactggacgccggagaaaatggaatacgaagtgtaagtcaacctaatttcaacgccaagagcaccgttttgagccaaaagccaagcggtgctttttactttaaatgcaggtcaaaaatccgggcagaatatttttgaaaaaaagctaaaataagagttgacaatataccctgtataggtatataatcaagataccctaagagggtatataaagcgaaatcggaaaggagaattccgttggaacatacagaagaaaaagagctgcacgcttgctgcaaaagcaatgcaaccgatacggaagcgtgcacagactgcaccgaagaaaaaaccgaagagaagtgctgcggctgtcataaaacaaagcaccgctccgatgaggagtacaaaaaactcatccacagattaaaccgcatcgaagggcagatccgcggcattcgcggcatggtggagaaaagcgcctactgcccggacatcctcgtgcaggtcgcggcagccaacgcggcactcaacgcatttacgaaagagctgctcgcaaaccacatcaagacttgtgtagcggatgacatccgcgcaggaaacgatgaagtcatcgatgagcttgtcaccacactgcaaaagctaatgcgataattttcggcgtatttttatgaaaggaagggaagaaaatggaacagtataacgtcacgggtatgagctgcgcggcgtgcagcacccgtgtggaaaaagcggtcagcaaggtgccgggcgttacgtcctgctcagtcagcctgctcacgaactccatgggcattgagggcacggcttcgccggaaagtatcatcaaggctgtggaagatgccggctacggcgcgtccaaaaaaggtgcggcacagaatagcacaagccccaacgctgctgcagaggatgccctgaaagaccgcgaaactccaaagcttaaaaagcgcctcattgcgtccgttggctttttggctgtcctcatgtacatctccatggggcacatgatgtggggctggccgctgccgaattttctcaaagacaaccacgtcgcgatgggcctcatccagttgctcctcaccgtcatcatcatggtcatcaaccagaagttcttcatcagcgggtttaaggggctcattcaccgcgcaccgaatatggatacccttgtggcgctcggctcgggcgcgtcgttcctgtacagcacttatgcgctgttcgccatgacagatgcccagatgcgcggcgatatggccgccgtcatgggctacatgcacgagttctacttcgagtctgccgccatgatcttaacgctcatcacggtcggtaaaatgctggaagcgcgctccaaaggccgcacgaccgatgccttaaagggtcttatgaacctcgcgccgaaaaccgccgtgctcgtgcgggatggtcaagaggtcaccgtgcccgtttccgaggttcgccgcggcgatgtgtttgccgtgcgccccggtgagaatatccccgtagacggcattatcttggaaggcgccagcgccgtcaatgaatccgccctcaccggcgagagcattccggtcgataaggccgtgggcgatgctgtttccgccgcgaccgtaaaccagtccggcttcctgcgctgcgaagcaacgcgcgtcggcgaagataccacgctttcccagattatccgcatggtcagcgatgccgccgccacgaaagcgccgattgcgaagatcgccgataaggtttccggcgtgttcgtcccgaccgtcatctgcatcgctgttgttacgttcatcgtctggatgctcgttgggcagacgttcggctacgcgctcgcgcgcggcatctccgtgctcgtcatcagctgcccgtgcgcacttggcctcgcgacgccggtcgccatcatggtcggcagcggcatgggcgcgaaaaacggcatcctattcaaaaccgccgtttcgctcgaaaaaaccggcaaggtgcagatcgtcgcgctcgataaaaccggcaccatcacaagcggcgagccccgcgtcacggatattttatccgccccgggcatcaccgaaaaaaaccttctggaagccgcaagtgcgctcgagaaaaagagcgagcacccgctcgccaaagccatcatggcgcgcgctgccgagatcggcgtgcaggcaaaagaagtcacagacttcatggcaaagcccggcaatggcctcaccgctgccctgaacagcgaagttctcgcaggcggcaacctgaagttcatctccacgcaggcagatgtccccgcagactttaaagaaaaggccgaagccctcgcgcagtccggcaaaaccccgctgtatttcagcaggggcggtaagcttatcggcgttatcgccgtagcggatgtcatcaaggaagacagcccgcaggccatccgcgaattgcagaacatgggcattcacgtcgtcatgctcaccggtgataacgcccgcaccgcagaggccatcggccgacaggcaggtgttaatgaagtcatcgcaggcgtcctgccggacggaaaggaaaacgtcatccgcaagctcagagagcagggcgaagtcatgatggtcggcgacggcatcaacgacgcgcccgcccttaccagagccgacatcggtgtcgccatcggcgccggtacggatatcgccatcgacgccgcagatgtcgtgctcatgaagagccgcctgtccgatgttcctgcgggcatccgtttaagccgcgccacactgcgcaatatccacgaaaacctgttctgggcgttcatttataacatcatcggcatcccgctcgcggcaggcgtgttcattaacctgctcggctggcagctgaaccccatgttcggcgcggcagccatgagcctttcgagcttctgtgtcgtcacaaacgcgcttcgtctgaatttattgaacatccgcagtacgaagcacgataaaaaaataaaatcggcaaaacccgccgaaatgaaaaccatcgaggtaaaggagacaaaaaccatggaaaaaacaattaagattaacggcatgatgtgcccgcattgcgaagccactgtcaaaaagtgtctggaggcgttcccgcaggtcacatctgcagaagtcagccacgaaaagggcacggcggtcattcagctcaatgctgaaatttccgatgccgagctcaagaaagccatcgaagataagggctacgaggtcgtaggctgagttcgataaagcttgacacaaatttaatctgtgttacaataaaagcactgcctgtgttgagggcagtgcttttgcattttacaatttgttcacagcaaattggctttttagaaagaataacggcgtaaaattaacataaagctaacgtaaagcaaacggataaagtttcgcccgcctttttcaaaggcggcggattccaaaggcagcgcctttggtcgtcgttcgcaaacgacgaaacctttttgcctccccaaaaaccaggaaggtaggctcaacagtccggtggactgttgagccgtagggaacccagttgcatgggttccctgaaaggcggcacaaagccgccttttcaaaaaccacacagccaaagaatactaaagaagagatgaggaaatcacatggcacgagagcggtatctgctggacgatacggaagacaccattcatgaaaacgaaatcaagccgcagactgcggcggataaacgcaaaaactggtgggattatcacaaggtgcacgtcctgctcgtcgcgctcgccatagccgtcgtcggctatttcatatattcggtcacatccaaaacggaacctgattataccatcaccgtcatgacgcagtataccgtgccgagcgacctgcaaaccgatattcaggagcttttcgagaaatatgcagacgaccgcaacggtgacggcgaaacatacgtcgccatgaatttctgccgctttaatacaagcggcacctcggagtttgaaacatcagagctgcaggcctcgttcgtcaagttcgcgaccgatgcctccgccggtgacagcatgattttcgcttacgacgacgcaagctataaatacctcgatcaggacgatttagaaggcttctttggccccgtagacggcaccgataacgactattacctctggaaggatattccggcgctgaacaacttagagctcaaccactataacgaggagggcgcaacgaaagaaagcgtgctttccgtcctcggtgagctcaaggtcgccgtccgtacagaagacggcgccgcgttcaaaaagcaggaaaagatcgattaccgcaatgacagcgtcaagctgtacgagcgtcttttgaacgacgaacccgcaaataccgaaaattaaatgagagagctgcacatttttacgcgcagctctcttttttctttgacagaaccacgcagacggactataataagcacatagtataccatgtcggtatacatcatccgaattcacgaaaaaggatgggataaaaatgaaactgaaacaacttttaaccgccatcaagtatcgcgcggagcaggtgccggatgttgacatcaccgaccttgtgtacgattcccgtaaggctgtaccgggctgcgcgttcgtctgcctgcgcggtgcgaatgcagatggccataagtacgcgaaaatggcagcggaaaaaggtgccgccgtcatcatcgcagaggagcccgtggaagcgcccgtaccggtcattttaacggataacacccgccttgccctcgcatatttgagcgccgagttcttcggccaccccgcagagcagatgcacgtcatcggcatcacgggtaccaagggcaaaacgaccaccgcgttcatgatgcgctccattctggaggccgcaggccataaaaccggcgtcatcggcaccatcggcgtactgtacggcgataccctcgttcaaaccgataacaccacacccgaaaactacgaggtgcagaagttcatgcgccaaatggtcgatgccggctgcgaatactgcgttatggaggtctcgtccatcggcctcaaggaccaccgcgttgcaggcttcacgtttgagctcggcctcttcacgaatttctccgaggatcacatcggcggcgcagagcataaagatatggcagagtacatggcgtgcaaaagcatgttgttccgcatgtgccgcaccggcatcatcaatatcgatgacccgaattataccggcatcatcaaaaatcatacgtgcaatattgttacctacggctacgataaatcggccgattttgttgcgcatggggaagaactcgttaccacaccgggctttctcggcgtgcgcttctccgtcacaggcaagctgaattttaccgcggatgtcgccatccccggcaagttcaacgtctataatgccctgtgcgccatcacggcgtgcagcgttttgaatatccccgtcactgccatgcagcaggggcttaaaaccgtcaaggtcaagggccgcgtggagcctgtgccgatgcccggtgatttcaccctgctcatcgattatgcgcacaacgccgtcagcatgcagagcattttgacaacgctgcgcgcctataacccgaagcggctcatctgcatgttcggtgcaggcggcaatcgccccaaggtgcgccgtttcgagatgggcgaggtcagcggcaatttagccgatctctccgtcatcacggcagataactcccgttacgaaaatgtactcgatattttagcggacatcaaggtcggccttgcaaagaccgacggcaaatacattgaaattcccgaccgccgcgaagccatccgctggtgcattgaaaacgcacaacccggcgacattattgtcctcgcaggcaagggtcacgaagattatcaggagatcgagggtaaaaaatacccgtttgacgagcgtgtcgtcattcgggaaatccttgattccatgaaataaagctcataaattactttcgggaaaggacttgtgcagaaatgaataaggaaatcacactggaacagctcgcttcttatgagaccgcgttcgacggtgaccgcgcgaaccgtatcgccatggatgctgtcacgaagaatggggtcaacaacgccgccgtgcgttttgagaacgcccgcgaaatgcgccatacgttcaatatttctctggagcagggcgacatcacgaatcagaagcagagcggccgctgctggatgttcgcggcgctcaacaccatgcgcttccgcatcatcaaaaagcttggcgtcaaaacgtttgagctctcccagaactacgcgctgtttttcgataagcttgaaaagagcaactatttcctcgagagcatcttagagacgctcaacgagcccaccgcaggccgccttgttacatatttgctttccggttcgctcggcgacggcggtcagtgggatatgttcgcaaacctcgtagagaagtacggcgtcgtgccgaaggaaatcatgccggaaaccgccgcatcctcctccacgcgtgagatcatcggctacctcaccgaaaagctgcgtgagtttgcctgcacgctgcgcaccgcgtatcagaacggcgcttccatggaagaactccgtgcaaagaaggacgacatgatgcagaccatctataacatgctgtgcatcagtctcggcaagccgcctgtgaagttcgatttcgaggtcaagaccccgaacggcttcgtgcgcgacctcggcatcactccgcagtcgttcttcaaaaagtacgtcgatatggatctttcccagtacatcagcctcatcaatgcgccgacgtccgataagccctatggcaagacctacaccgtcgcgttccttggtaacgtcgcagagggccgacccgtcaagtacctcaacctgcccattgaagacctgaaagcggcagccatcgcccagatgaaggacggcctgccggtttggttcggctgcgatgtcggcaagcgcagcgttcgcgacggcggcgttatggatctgaacgctcttgacctcgaaacgctcttcaacaccgagttcaccatggataaagctcagcgcctcgattacggccagagcctcatgacgcacgccatggtcttccagggcgtcaacctcgacgataacggtaagccgaaccgctggagagtcgaaaacagctggggcaaggatgccggtgtagacggctactacatcatgagcgacgcttggttcgacgagtatatgtatcaggtcgtcgtcgataaaaagtacctcacagaagaacagcgcaaagcgcttgagcaagagccgatcacgctccagccgtgggatccgatgggctccctcgcttcggtgcgctaaacgaaaggaaactactgcatttatgaatttaaaggtatctgagatcgccgaaatgtgcggcggcaggctcgtcggcagcggcgaaaataccgttacgtcgttttataccgacagccgcgagacgacgcccggcaaaatgttcgtgcccatccgcggcgaaaacaccgatgcacaccgctttatcccgcaggtcttcgcatcgggcgcggcagcgactttttccgaagagccgctcgatgcccccgcaggcgatgttgtctacgttgaaaacacccgcgcggcactgcaaaaggtcgcggaacgctatcgcgagcgcttcaatatcccggtcatcggcatcacgggcagcgtaggcaagaccaccacaaaggaaatggtcgctttagctgtttccgccggtctcaaaacgatgaaaaccgccggcaacgcgaacagccagatcggcctgcccatgaccgttctgcgcatcacgccggaggacgaagccgccgttgtcgaaatgggtgtcagtatgcccggcgagatggagcgcatcgcaaaagtcgcaaagccgaacatcgccgtcatgacgaatatcggcgtgtcgcacatcgagtttatgaaaacacgcgagaacatcatgaaagagaagttcggcatcacggattacctgccaaacggcagcaaggtgttcgtaaacggcgatgacgacctgctttccacattaaaaagcaccccggaaaagcagatcgtgcgcttcggtctcggtgaaaattgcgactggcgcgccgtagagcttgaggccgatacggagggaacaaggtttatctgtgtgcacgacggtaaacgcgtagaaatgtacgtccccgctgccggcgagcacaacgtgcgcaacgcccttgccgccgtcgcggtcgctgtggaagtcggcgttccggaggaaaaagctgtcgcggccatccgcacctatgcaccgcccgccatgcgccagcagattaaagaagcgcacggcgtcacgctgatcgatgatacctataacgccagccccgattccatgcgtgccgctttgaaaattctcggcggcctgaaagcgaccggcaaaaagtacgccgtacttgccgatatgctggagctcggcgattacgcagagcgcggccactatgaaaccggtgcgtttgcggcggaaaacggcaccgatgtccttatcggcgtcggcccgctcgcaaagtacatcgtcgagggctttaaaaatcgtgagaacagcgtgtggttcgcctcgaatgcggaagccatcgcgtatctgaaagaccgtctgcatcccggtgatgccgtgctgtgcaaaggttcccgcggcatgcacatggatgaaatcatccatgccctttcggaataagcccgtatactagaatatatttaatatatatcacaatataaagacaaaaaccggcaagttccttttcgcttgccggtttttttgcaaaacggaggaaggttgtatgaaaacaagattactgcgcccggaagaaaactggaaatcaaatctcaccatggctgtcgcctttgagggagattacgacctcgaaaaagccaaagaaagcgccgcccgtgagcgcaccgaagaagaaaagagggaagacgcccgcaaccgctgctttggcacatttttagacgacgatgagaccatctgcggtgttgtgaacagccgtgagtacctctgccgcttcgacggcggcacgtataagctcggcggtgtaggcggtgtttctacattgccgcagtaccgccgcggcggcgttatccgcgcttgcatgacggcctctctcaaagacatgtacgcaaacgatttcacgttcgcttttttgtatccgttcagcatgcagtattaccgtaagttcggctttgaagccggtgcgccggaataccgctggtcggtgccgttcacagcgatgaagccgcaggatgtcggcgggcacgtcgagcagatcttccccggcggcgatttcaccccgcttctcaccgtctataacgcgttctatgcagaccacaatctctccgccgtccgcgaaacgtatgataaaggtctcgaaaaagcgaacctctggaacgataagcgctacatattcgtctggtacaataacgaaaatcagccgcgcgggctgatgattacccataaaatcgaagaagacggcgtcacatatcttgactgcacccacacgttccaaagccccggcggtttcctcgcgtgcgatgccgaagcgttcaacggcttgctgttcttcgcaaaatccgctttctcgtcggattacgagaagcttcgcttcaccgtctcgtccgatatgcacttagagcagctcatcggcgaaaacacgcgcacgttctgctccgtgttcccaaacggcatgctgcgcgttgtcaacgtcgagcgtgttttagaaaactgtgcttgccgcggcacaggggagatcaccctccgtatcgaagacgatatcatcacggaaaataacggcacatggcgcctgcactttgcccccggcgagcaaaataaagtcgaaaaaaccgacgccgtaccggacctcatcctcaacatccgcgccttctctgccctcatcaccggcgcccgcgccgccgccgatatcccctggatgcctgacgtccgcctcctctgccaagctcctgccgtccccaacgtcttctacctcaaaaagtgctccatgatggatctgttctaagcatattaattttattgtaggattattagtaacaattacgaaaaaaagaagagattatagggggtaattagtgcgttgcacaggatttaaaaaacgaattgacaataagcgtgtcgaatggtatcattaaaaatatgtaacagtatttattaagaatataaggtgcgtgaatataaatgaataacagaaagtttgcgctttctatgatcatgaagttctccatttttgcattgcaattcggcttttttgccatggttttgttccaatattacggcccaagacttttccgtagagcagacagcatcggatatgcggtcacattgattctctacgccatcgtatacgtagcactcggcaatcttttccgtgcgtttaaaattacagattattccatagcagaaactattttttcgcagttcctgtcctttggtatggcagatttgctgctctatggcgaattctgcatgattcgccataattatgtaaacttaattcccggcattctcacggtgctttgccagcttttggcggcagcgtgctgggctcttgtcggcaagcgttttaccatcgcgttcggcaaaccggagaagaccctcgtcatctccggcgcggataatgtgaatgagtttctacaaaaatttgataagattggtcatatcttcaccatcgaaaaggtcgtttctgcggatattctgaagggcgactggaaaaaagaagtcgctccctatcaggctgtcattttctatgaggtttcctctaaaaaacgttcagaggtgatctggtactgcatgcagagccgcaaaagcctctatatcacgccgcagctcagtgagatcaccatggaaggcttcggagcgcgtcatctgatcgatacgcccatgatgaaatatgagtaccgaagcgagcgtttctggtacaaccttgtcaagcgcgtggtcgatattctgctttcccttacggcacttattctgctttccccgctgcttcttcttacagccttggccatcaagctcgaggatcgcggccctgtgttctataagcaaaagcgctgcaccaaaaacggcgaggtttttgaaattctcaagttccgcagtatgatcgtagatgcggaaaaaggcggcaaatccattccgtgtcgctccggcgatccccgcatcacacgtgtcggccgcgtcatccgtaaattacgtatcgatgaattcccgcagattattaacgtcttaaaaggtgatatgtccatcgtcggcccgcgcccggagcgcatcgaacacgtggaagagtacacaaaagaaatccccgagttttcctaccgcctgcgcgtcaaaggcggcctgaccggttatgcccaaatttacggaaaatacaacacgagtccctacgataagttgcggctcgatcttcagtatatcgaaaaacagtcaattctgcttgatttaaagctgattctgctgacaatcaagatcatgttcgtgccggaatccacagaaggcttcacagaagagaagtctgcccagatgacggagaaaaccaagagtgcggatgaactgcaagataaatgagcaaatatgtgtataatattttatattagggtttgtaataggtaaagggcttatgaagttttgagtggagcgggtttaattaaatgaaacaaaatgtagatgtagtaatagtcaactgctttgatacatacgagcacagggctatactattaaaagaagtttttgagagtattgggaaaaaagtttgtattatcacttcagattacaaacatattttcaaaatgaaacgcgatgattttccagtggactttgatccgatacatgtttatccatacaagaaaaatttatctgcacaaagactgttttcccattatagatttgcatgtgaagccattaatcatttgacgcaagaatatgatagtgtatcgctggtttggttttttgttccacccaattcgcttgttaaagaagcggctaagtacaagaagggcaattcacaagtaaaggttgtatttgatgttattgatatgtggccggaatctatgccgatttccaaatacaaaaatttacctccttttaccgaatgggggagactgcgaaatctaaagctcaaagtagcggatgctgtggtttctgaatgtgatttatacaaaagcgtattaaataggttttatgataaagagatttatacgttgtatttagcgcatgataacaattctctcgagtctaaacctaatccaccgcaggatagaatttcactttgctatttgggatcaattaacaatattgttgatatttctaaaatttgccgtgtgattgccaatctggataaaccggtagacttccatattataggtgatggcgagaaacggcaagagctgattgatgcggcatccaatgtagaggcaaatgttgtttaccacggcaaagtatatgatcgagtagaaaaacaaaaaatctttgatagctgtcatgcaggcttcaattttatgaaagacagtgtttttgtcggtctaacgatgaaaagtatcgattactttgaagcaggactcccaatcctgaatacgatcaaaggcgatacgtggaaatttgtggacgaactgggaataggtgtaaatgtcggagataattcggtcacagcagatcagattatggctttgcaaaaatcaagaaaagaagtgcgcagcttttttgacaagaactttacaaaaggtgtattccgtgaaaaagtgttaagaattatttcaactttaaatttgtgatgaatacatagtgctttcgcagactattgcaatcatataactgtgtttagtggttgaaattggtattttgtagcttgagaatcggttgcatcatgaaaaaacgatgtgaccgatttttcatataatgctcagattgctgttacctatatttaaatctttgcgtttcagtaaatgcaaattctagcttagggttgcttttaagcagataatacggtataatacattatgaattaagttgtcgatttatataggaatacatcgtaataaatgttagaataagtcttatttatggtatatattgttgaaagaaagttgatgttatgaaaaagatttcaatagcgatggcagtgtataatggagaacgttttttagaggagcagttagattccattctgcagcaattagagccacaggatgagcttgttatttcctatgataactctaaagacagaacatgggaaattataacctctttttcagagcgctatccgcagattgaaatttacaagaataaaacgcccggtgttactggaaattttaataatgcattgtctttgtgcacaggagattacctgtttatttgtgatcaggatgatcgttgggcagaaaataaacgtgctgctgttttggagacttttgaaaaaacaggtgcggatatggttattcataatggcgttcatattgatagtgaaggaaaagtaatttctgaacctttttttaccacatatagaataggtgatggaaaaatcagaaatatccttcgctctcggtatagtgggtgctgcatggcttttacacgtgagatggcacagaagatcttgccgatgccgccgaagatcgatgcgtatgatagatggattggcacggtaggagagttcttaggaaaaattgcatatgacgatcgaatccttttatatcaccgtatgcatggagataacgttactacgaacacgcgttctataggcgtaattttgagtaccagaattgatcttattaaagagcttagaaagcgaattcgccgggagagaagagcataatatggatagttcctgcaaaattgcggttatagtggttgtatataataaatcgtgcaaaggaagtatcacttgccaagcattgaaagcacttagacacactaaggtatcggttttagtatatgacaattctgtgcgagatttcggcaatgcgtcttattgcgaaaaacaagaatggatttacttctcgcaaggggaaaatgttggcatttcaaaagcttataatgtgtgtgtagaccatttaaagaaatatatgctggcagattatttgtgcttatttgatgatgatacgaatattagcgaagagtactttgatgcattaaattccgcaataaatgacagtggtgccgatatatatgttccacttgttttttctgcggggcgattgctttctccctgtaaaataaaatctaattttaatgtgtcaatgtttaaagatgagcaggaggctctactatacaacagaagagatattactgcaattaattctggaatggcaatcaaattaaatgtatttgataactattgttatgatgagcatattttcttagatggcgtagatcataactttatgagagatatgaacattcagaaaagaatgataaaggttttcccttatcgatgtacgcatgaattcagtggagatagtaaaccctctatgcagagcgctttaacaagatttcaaatttttgcacgggataataggtatattttacaaaatagtcgtatatcttatttctttattgctggaaaacgagctgttaaattgaccatcctttatcattcgatgagttttttgaggactttttttagagttagtagttttaaagagttcaggggagaggcttatgaaagaaaaaatgactaagcaagttttgcttaaagacttaccgggagttttaattggtatagttggattaatccttggacttgttatttgcccggataatcattatttggccgggctgcttctattagtatgtgctgtatgtgtttatgtgcactgtgtgtttgttcaaacttccagaaattggttggatattcgaggcgtcttttctgctatatggatagcaacgattggattagctgttttgcgccttacagattatcaagtcttatgggaaacggagacatggatttgccaaatcattgcttacatagcatttcatgttggtgcgaatttgggaattcactttggtggtacatggttcgtaaaaatcaagagcaaaaactcagaatcggaagaatctctcaacaataaagatacattcagactccatggagagagattatttccgatatgtgtcattcttacaatatttggcatagcttgctttgttattaatatttgtatacgcggctatattcctttttttgcagctgatggtaataatgcgtatataagattttataccaaatggtatttttttgcagttgcagcgactattgtgtctgggttggattattacgtgataaaaacacaaagcgtaaaaatatggcaaaaagtttttttatggtttagtatcatttattcggtaattattttcccaattttaatagtaaatagaagtgcacttttatctgctggattgtcacttattacagtggtgttttatcttaatagaaagaaattcgcagtacttttgttaagcgtgatagtgcttgcagctgcatttggagtttgcaccagcgggcgtggatattcggaggcacagttaaaagaattttttgaacccagtaagattgaaatcggtgtagcagaatcgacagacaattctgaaccagttagcaaagatacaagcaattctcaatcttccatagaaggcttgccggaaagttcttcaacagatgatagtagtgctaatatagaagataatcctgatatgagcatttcagaagaaactgataataaggggacaggatttgagctttcagggacagcagcgtttatatatacctatttgacggtaagtcatgataatttaaatgaggctgtgttgcatgatattgatagaacatatggtgctttacagtttactccttttaacgttatcttgagaatcccatctatacagcaaatgattgatgaagcacatatttataaggttcgtgatcaccttactacaattaatttgatcggatatgcgtactacgattttggagtagtgggagtagttgtttttatgctcttatggtcatttgcattcggagtcattcaggcttgttatgaaaaaggaaaaggtatcttttctttgatggctttaggtgttgccatgacaccaattgcactgtgtttctttgatccatggatgagcgagtttattcaatgggtatattggggagaggttttgattttgtttatggtatcatatgtttctgtgaataaaatcaaaagcaaaaataaagtgtaaacaaatttaaataattcagaggagagtgaaaacatgaaaggcatcattttagcaggcggctctggcacccgcctttatccgctgacaaaagtaacatcaaagcagctcttaccgatttacgataagcctatgatctactatccgatgtctgtcttgatgagtgcaggtattcgagatatcctgatcatttccacgccacaggatctgccgcgttttgagcagctacttggtgatggtcatcagttcggtgttcaactgagttatgtagagcagccgtctccggatggcttagcacaggcctttattttaggtgcagattttattggcaatgataccgtcgcaatggttttgggagataacatttttgccggtcacggtttgcagaagcgtttgaaagcagcggttcagaatgcagaaaacggcaagggcgcaaccgtgttcggctactatgtggatgacccggagcgtttcggcattgttgaatttgataagaacggcaaggctgtttctattgaagaaaagcccaaaaacccgaagagcaactattgcgtgacgggattgtatttttatgataaccacgtagtcgagtatgctaaaaatcttaagccgtctgctcgtggtgagcttgagatcacggatctgaaccgtatctatctggaagagaatgcgctgaatgttgaattgctcggccagggatttacatggctggataccggaacacatgaaagcctggtcgatgcaaccaactttgtaaaaacgatggaaacacatcagcatcgtaagattgcttgcttagaggaaattgcatatctgaacggttggatcagtagggaagacgtactggaagtttatgaggtgttgaagaaaaatcagtacggtcagtatcttaaagatgttttagatggaaaatacatagataagtagggagagtatgaatatgacgatcatcgttaccggcggcgccggatttattggttccaattttatttttcacatgctgaaagaatacccggattaccgcattatctgtctcgataagttgacctacgcaggcaacctgtctacgctggcgcctgtcatggataacccgaatttccgctttgtgaaggccgatatctgcgaccgcgaagctgtaaataagctgtttgaagaagagcatccggacattgtggtgaactttgccgcagaaagccatgttgaccgttccatcgaagacccgggcatcttcctccagacgaatattatgggtaccgcaacgctgatggacgcttgccgtaagtacggtatccagcgctaccatcaggtctctaccgacgaggtttacggcgacctgccgttggaccgtcccgacttgttcttcaccgaggagacaccgatccacaccagctctccgtacagcagctccaaagccggtgcagatctgctggttttggcttatcaccgtacctacggtctgcctgtgaccatttcccgttgctccaacaactacggtccttatcacttcccggagaagctgatcccgctgatgatcgcgaatgctctggcagacaagccccttcctgtttacggcgaaggtctcaatgtccgcgactggctgtatgtagaggatcactgcaaggcgattgacctcattatccataagggccgtgttggcgaggtatacaacgtcggcggccacaatgaaaagcagaacatcgagatcgtaaagatcatctgcaaggagctcggcaagccggagagccttatcacgcatgttggcgatcgcaagggccacgatatgcgctatgccatcgacccgaccaagattcataacgagctgggctggctgccggagaccaagtttgaggacggcatcaagaagaccatccagtggtacctcgataaccgcgagtggtggcagaccatcattagcggcgagtatcagaattactacgaaaaaatgtacggtaaccgctaaaacgctcagggagagatcagtatgaagttttttgtaacaggcgttggcggtcagctgggacatgatgtcatgaacgaactgctgaagcgcggccacgaaggcgtgggttctgatattcaggaaaactacagcggtgtagcagatggttctgcggtaacaaaagcaccgtatgtagcactgaacattaccgacaaagatgctgttgagaaagttattacagaagtaaatccggatgctgtaattcactgtgcagcatggactgctgtggatatggcagaggatgacgataaagtggcaaaagtccgtgctatcaatgcgggcggcacgcagaatattgcaaatgtatgcaagaaactggattgtaagatgacctatatcagcacggactatgtgtttgatggtcagggcacagagccctggcagccagattgcaaggattataagcctttgaatgtatacggtcagacaaagctggaaggtgagttggcagtcagccagacactggagaagtatttcatcgtccgcattgcttgggtgtttgggctgaatggtaagaactttatcaagactatgctgaatgtcggcaagacacatgacactgtccgtgtggtcaatgaccagatcggcacaccgacctatacatacgatttggctcgactgctcgttgatatgaatgaaactgaaaaatacggctattaccatgcgaccaacgagggcggctatatcagctggtacgatttcacgaaagaaatctatcgtcaggctggatataagacggaagtcctgccggtgaccacggcagagtatggtctgagcaaggcagctcgtccgttcaacagtcgcttagataagagcaagctggtggaagcaggatttactccgcttccgacttggcaggatgcactgagccgttacctgaaagaaatcgagcagtaagaggagatagagaagatgggacagattaaagttgagaaaaatgtaggtggcatcgagggcctttgtgttattgagcctgccgtgcacggtgatgcccgtggctatttcatggaaacctacaacgaaaaagatatgaaggaagcgggcattgacatccacttcgtacaggataaccagtctatgtcaacaaagggtgtgctgcgtggtctgcactttcagaagcagtatccgcagtgtaagttggttcgcgctgtgcgcggtactgtattcgatgttgctgttgatctcagaagcaattctgagacctatgataagtggtatggtgttacactgtctgccgagaacaagaagcagttcctcattccgaaaggctttgcgcatggcttcctggttttgaccgatacagcggaattctgctataaatgcgatgatttctatcatccaaacgatgaaggcggtctcgcatggaatgacccggaaatcggtgttgaatggccggagttgaaaggtgagtacaagggaagcgcaagtgcagatggctacacgttggaagatggcacggcactgaatctgagtgataaggaccagaagtggctgggactgaaagatacctttcagttttaagtaatatttatgagtaaagaaaaagaaagcagaagtgcggtttctgcgggtattggttatacgattggaaatatacttataaagggcataaatttcctttctgttccacttttcagcagaataatgactccggatgagctcggtgtatacagtgcttttgtagcgtatgattccattctttttgtaattctaagtttagccatacatagcagtgttaaaaatgctaaatacacattttctggggaagtagacgagtatacttcgtctgttagcttgattttgtggatgaatatggctattggtcttatcgtagcaacactattttcaggcccgttatcaagcttacttgggctgccggttgtttgtctttatttgctggtgttcatgagttttggctcgtcggtgctaaatctttataattgtaggattagcttggattataactataaagggtatttgtttgcagcctttgctaatacagttggaaacctgttggtttccttagttttaattcacactatatttcaaaatcaaaaagatttaggccgtatcatcggtgtttcggtaacaatgttgttgctggcactggtactattgggcacgctttatcatagggctaaaccaaaatttgaacgcagattctgggaatatgctgttcggtatagtttgccattggttccgcatggtttgtcacaagttcttttaggccagtttgatcgtattatgattcggtctatggtaagtgatgcggcggcgggtatttatagtgttgttgcgaatatcagtttaattttaacaattattatcgattctgtatctacggcatggactacatggttttacgaagcgtatgctgagaaaaagattgctgagattcaaaaacgagcagtgcagttaaccattttttttgccatacttgctattgggttaatggcgcttagcccggaattggtatggatattgggtggtacacagtacgaatcgggtaaatatgttgccattccgcttattttaagtgcttttgctgtatttatatataacgtggttgttccagttgagtatttttgtgagaaaacaatgtatattatgattggaacggctgctgctggtgtggtcgatattgttttaaactatatttttattatgaaatatggatttatagcagctgcgtatacaacacttgtggcatatatatgttatgctgtgcttcattttattattgctcggaaactttctggaatatctattttgccttttaaggttgtttgttttatagtagttttgctgctgtgcatggcagctttaaacttagttttcatatcttccattattattcgatatcttgcatgtgcggttgcagttatcccgatgggattattactgcttaagcggctatttaaggagaaaaatcaaaatgactaagagagagttgacgctagctgaaattcatgagggcacgttggaagtattaaaaagattcatttccgtttgtgatcagataggagtacagtatttcttggcatacggttcactcataggcgcggtgagacaccatggatttattccttgggatgatgacttggatgttattatgcttcgtccagattacgaaaagtttagagagtattgtaataaacatgaaggggaacttactcctttcaggttttttgatcgccacaacacgccggattacccttatacgattggacgcttttgcgatacccggtatcgaatggtacgaaatgacaacgtgccagatgcagggcaggggatgtttattgatatttatccgcacgatggtgcaggtaataacaatgataaacgttggaagagtattctgaagaagaaaaaacatttgatggctttacttgggtgcgcatttagtaaaactcctattccatctaaaagcaataagctgctcacaccaattcggttgcctatatatttgtattcacatttcaaaaagccaaagtacttccttgataaaatggaagcattaagggaagtttatccttttgataaaagcaaatacgtcacttgtattatatgggatgtagaggttcgccagtgcccgaaagaatggtttttagagtatacaactcttccctttgaaggaattcaagttaaagttccaaaggactatgacagcgtattaagagatacctacggcgactatatgcaactgccaccagagagagaaagacatccgtaccatggatatcgactttatagaaaagaagattaagcattatacgggatggttttgaattgaagctaagaggtacttttatgttatcaattattattccatcttgtatactgcaagaattgaaagacaaaggaactagatacttatggtatttggggttaggcatgcttgctgcgttggttgtttattaagcttaattgaggggtaatacagaaaaatgaaaagttgctaaataaagaggcagtattgtatatagtatttggaatattgacaactgtagttaattattcagcttttttgctttggtataataccttatttagaggtaaagatggtctttatgctaatattatagcttttattgaagcagtgctttttgctttcgttgtgaataagttatttgtgttcgaaagtaaaagttggtcttttatggttttgaaaaaagaaattccatcttttttagccacaaggataggttcatttatagttgaagaatttgggctatttattgctgaaaaaatattgcggttgaatcgttttgaggttttgagaatttgggatactgtgattgacggtattgttattgcaaaacttgcgttagttattgtcgtggttttattaaactacgttttttgcaaattttttgtctttaagagtacaactattaaatagcaatattgttatgggattttgaggtagttattcttctgattgcgcaacatacatagctgtcatatcgctgttatcccctccccacatgcaccaaatgcgcgatgcccggtatgctctcgccctgctgcgaagaggttgtggacatcagtgcgccggtcgccataaagagaatatttttcagctctccgcgatccatgcgattcaaaatatgcccgcataatacaccggctgagcatccgcagccggagccgcccgcgtgcacgtcctgtgcctcgcggtcaaataaaatcagcccgcagtcctcgtggttgcgcagaacgatcccgttttcgcgcagtaattcgtataataattttgtgccaaccgccccgaggtcgcctgtgtaaatgcggtcgtagtcctcaggctttgtcgccgagtcgttaaaaaaatccagcaaagtctgcgccgcagcgggggccatcgccgcgcccatgttcgtcatgtcggtcacaccaaggtcggtgatgcgccccacggtcgcgtgccgcacttgaatgtcgccgctcataccgagcaccgcgctgcccgaagctgtcgccgtccactgcgcagtcggcgcgcgctggctgccgtattccagcggcgtgcggaattgccgctccgcggtgcagaagtgggaggaggtcaccgcgcaggcgtagttcgccgcgccgcattccaccatgatggaggccatgatgagcgtttgcgccatcgtggagcacgccccgtattgcccaaggaacggaatgtccattccgcgcagaccaaacgtgctcgaaatgcactggttcagaagatctcccgcaaataccatgttaatgtcctgcttttgaagccccgccttgcgtatcgcaaggttcgcggcttctgtttgcagcatgctttccgctttttcccagctttcctgattcaaataagaatcgagaaacgtctggtcaaagtcgcgcgccagcgggcccgcggcttctttttttccgcacaccgccgcgtggcccaaaatcgccgggcggcgctcaaatagaagcgtgtaacgtccgagtcttttcataagccctccttaaaacagcccgatgatatacagcacgatcccgtacaaaaccgaagccgaaatgccgaacaccagtaccggtcccgccaccgtgaacagctttgcgccgaggcccgtcacaaagccctcgcttttaaattccagcgcaggggagaccatcgagttcgcaaaccctgtgatcggcaccagcgtgcctgccccggcatatttcgctatgttgtcgtatacgccgcaggctgtcagcgcggcggaaatgaaaatgagcgagatggaaacgcacgtccgcgcatcttttaaatcgagccccagcagcatgaacgtgttcgcaagcgcctgccccagcgtgcagatggccccgccggataaaaacgcaaacaggcagtttttcagtacgggggagtgcggcgaagccttctgcaccatcgcgtcatattgctgcggtgttttctttttcatgcaatcaccctttctgtttaaccgggtttattgtgcgtatcgaggtaaaagatattccacatttttaagattttagttgattatctcaaacagagcgtgtataatcagttgcaggtgatattattatgtctaaactcagcatcctgaagcagaaaactaagcgcgatgtggatatgacgcagggcagcatcttccgccacctcatcacattcgcgtttccgcttctcatcggcaacattttccagcagctctacaacacggtcgatacgtgggttgtcggaaactatgtcagcaacgaggctttctcggcggtcggcacggtcggtcccgttatcaacatgctcatcggcatattcttagggctttccagcggcgccggcgttgtcatttcacagtattacggcgcaaagcggtatgataaggtgcgcgataccgtccacacctccatcgtcatgacgctcattttggctgtgctctttacgatcatcggcatcgctatgatccctttcgtgctcaatttcatgaagactccggcagaggtcatgccggagtcctccgcgtacctcaccatctacttcgcgggcgtcatcggccttatgctctacaacatgggcgcgggcattctgcgtgccgtgggtgattccaagcgcccgttctattttctcgtcgtctccgccgtgctcaacatcattctcgatctcgtcttcgtgctgtcgctcggcatgggcgttaagggtgttgcgtatgcgaccatcatctcgcagggcgtctccgccatgcttacgatgattacgctgttccgcacggattcctgcatcaaggttgagctcaaatacttgaagctcgataaagaaatgctcgcgaagattgtacgcgtcggcatcccggccgccatccaaatggcgatcaccgcgttctcgaacgtatttgtacagtcttatgtgaactacttcggcgcagactgtatgtccggctggacggcgtacagcaagattgaccagcttctcttcctgccgatgcagtctctcgcgctcgcgtctaccacattcgtcggccagaacctcggcatcgatcaggtcgtccgcgccaagaagggcgcgcgcacggcgttcatcatgtccgtcgtcgcaaccgtcattctgacaatcccgctgctcatcttcgcgccgcagctcgtctcgttcttcaacggcaaagcagaggtcgtcgcatacggttccatgctgctgcgttattgctcgccgttctatgtgttctgctgtgtcaatcaggtctactccggcgtgctgcgcggtgcaggcaattcccgcgcaccgatgattatcatgttgagctcgttcgtcgtcttccgccagatttacctctttatcatggcgaacttcatctccaacaccatcattcccatcgccttaggctaccctgccggttggctcgtgtgcagcaccctcacactgctctattatcgccacgccgacctctccaagagccgtctcgtcgaagacgcagagaaaaaagcagaagcttcaggaaaaagccgcataaaagctgtataaaatacagttgtacaaaatacaacaaaattgcccctcgaacaccgcatgcacgtgccggtgttcgagaggcttttttcatttccgcaaaatcgtactacctttccaccttttctcctcgacaaaaccaaaattttttcaaaaatccatctttagatggattacatttcgcgcggaatatgatatattgtggttataaaccataaaaggggagtagagcacatgaatgaagtcgtcatcaagccatcgctgcgcgagcaattcttacagggttgggctcagtgccgcgtcattttcttcagcgcgccgtgcggcttcggcaagtctacagccgccaccgccttgctcggcaatcacaaaacctgcgtgttttcggcagaagacccggaattcctgcgcgagcccgtgccgaaaaatgtagatgcgattgtgatcgattccctgcccgcgctcaaagacccggaagatcagcaaacgctctgcgcatggatccgcgaaaatccggagctgcacttcgtcattttaagccgcggcgtgctgcccggctggctcatgccgttccgctttacagggcttttgcagctcatcgaggccagagatttgctgtttgaccgcgataccgtgcgtgtttttctggaaaagaatggctgcacaccaacggaagcagagatcaacgtcatcatccacgattctctcggctacccgctggccctaacggcgctttcgcgcctgatgcaaaacggtcagccctatacgccggagatcgtcggcattgtgcagcaggaaatctatcactattttgaggataacatcttcaaccgcttttcaatgccgctgcgccgtatgctgctcgacatcgccccgttcgatacattcgacgccgagcttgcccagatgatttccggcgacagccacatcaacgagcttatttccatcgttcggcacgataccaccatgcttttaaatgccgatgcacagaaataccgcttctggagctttttccaacagttcctcatgtgggaactccgccaagtctatacgccgcaggagcaggccgcagtgtacagccgcgccgggctttactatgagctgcacgaagattacgagcatgcgctcgagtgctattcgcgctgcaaagaccaccgccgtgtctcggaaatgctcatccgcaacgcagagcagcaccccggtgtgggacattactatgagatggaaaagtattactatgctatcccgaaagaggagattctccgctcgccatcgctcatgtgcggtatgagcatgctcacgtccctctgcatggattacgaagcctccgaaatgtggtattccgccctgcaggagtatgcagccccgctcaaaaagaccgacaccgcctacaaagaggtgcgcggcaagcttgcatatctcgatatcgccctcccgcagcgcagcagcaaaggcatcgcagagaacatcggcaactatttcaaaattctaacggataaaagcttgcaaacacccacgttttctgtcaccagcatgctgccaagtcttatgaacggcggcaaagatttctgttcgtggtccaagcacgatgaactgctctacaaaaccatccgcaagccgatggaggctattctcggcaaagacggcatcggttttgccgattgcgccctttgtgaaagcaaatttgaaaaaggggaggataaccttccgtggctcatgacgcttgtagcccagttgcccgagatcgagcgtcacggtacgccggatatgacgttcgccatcatcggtctcatggcgcgcgcccaaacgaagcagggcaacgccatcatggcgctttcttctttagacagtctgcgaacagagtttgaggaggacaacaagcgtttcctgccgaatattgatgccatgcgctgccgtatatggctgcgcaccggtgaaatggaaaaggcagagcagtggtaccttacatctgccccccagatcacgccgcgcatccgtaccatgtggcgctaccagtatataacgcgtgccatggttgagatcgcgctcggagaagaaaatgcggcgctgctcacattggccgcactcatcccgttctgcgaacgctgcggccgcgtgatggaccgcatgtatatccgcatcctaacgtccgtttgctatcagcggcaaaataacgcccggtggcaggaggagtggatgcaggcgcttgatgccgcccatgagtaccgcttcgttatgcctattgcgcagtttggcgccgccgtaatgcccatgctgacgtttaccggctacaaaaaggacgagtccttcttttcactccttttacaggaaacgcgccgtcaggctgttttgtacccgaatttcttgcgtcccatgccgcggctctcagaaccgctttcgcccgcagaaacgcaggtgctccggctcctgtgcggcaaccgcagcaaccaggagatcgccgacatcctcggtgtcaaggtcgccaccgtcaaaacgcatgtcatccacatcctccaaaagctcggcgtcaaacgccgcggcgacgccaaagaaatcgcccaaaaactccatatcatcgagttttgacgaaatcccttgacacccacctgaaaaacagtatactaaaagcatacagaccatagaaaggggagagcccatgtccccaatatctctttcatccgtaaccctcatacaactgatcgcgaggtgaccccatggctttcaaaaagcatttcaaagttctcctgccgctcctgatcttagtcgcgcaagccgtaagcggcgttttcggctttattctttttgggtggctttcaactgctcttggccgtataggcggtgagaatagcggtttagaggagttctttgcttacgtgtcagcgtttattgtacttaccatgacgacaagcgtaacccctttcatcaacctcgaacttgaaaaaggcggttacatacaaaaaatctggaatacagcagaagtactggtcgtacagagcgtctgctcggctttctttgtgtggcagcactgcaaagtgtatttcagaccgctggatgccagttggctcggcgatgcgttggtcacactgattcccatgattatcggtctctccaacgtcctcgccatgctcattcaaatcgccatctacgccatcttaaaccactgtaaaaaccgccgcgccgcgctcactcaaccgcagccgacaccgcccatcgaaccgtaaaaaccaaaaactcccgactgccgcaaatgatgaaccgcagcagtcgggagttccttttatttaaatatttaatttcagcttacttttccaaaaatcccttcagcgccgcatagtccacattctccggcttcacttcgtcaaagaacttcagcagcttttcggccagcacgcgtacgccgccgacggaattgctttcgatattcagcggtagaatggggtcgtgtacgctcatgcgcagcaggaaccagccatcgccgtcgttttccgggaacgaaatgcggatgccttcgcggttgtccggcgcaatgttccagttgtgcgctttcgcgtagctttcaagcgccgcaatggtgtcctcgccataggggcggaaatcctccgcggtaatggggaagcgcaactctttttcttccttggcttccttcagatcggcgatgagactatcgagcgatttgccctcgcggcgcagctgtgccgccttaatgatgatcttcgtcaccagataggcaccgtcgtcaaggaagtagttctcgcgcagcgccgcatggccgctcgtctcaatcgccagcgggcaattcacgccctcgttattcaggcgcaccgcttcgttgatgacattcttgtaaccgcgcttaaagcggtgatgcttgccgccgagcgtctgctcgatgtaggtcttgagtccgtcggacgtaatggagtccgtcacaatggtgccgcccgggttgccctccagcgcaatggcggaagcaatcgccacaagacggttgcggttgatctcttcgccgcggctgtccacagcgccgccgcggtctacgtccgtgtcaaaaattacgccaaggtccgcaccggccttcacggtcgccgcgcaaacgctcgccatggcctcctcgttctccgggttcggaatgtggttcgggaagcggccgtccggctccaaaaactggctgcccgtaatgtccgcaccaagcggcttcagcacgtcgtttgcgtaaaaaccgcccgcgccgttgccggcatctacaacgattttaaagcccgcaagcgggtgcgcataatcttccgcgttcacgcccttgcggatcatctcgcgcagattatctgcatatttcgacatatagtccaacggcaccagcgtgccgttgtcggtctccttcggcgcagcgccgttctgtgcatattccaaaatctcggaaatatccgggctgtcaaggccgcccgcaggcgtgaagaacttcagtccgttgcggaagaacgggtggtggctcgccgtaatctgcaccgagcagtcgcacggcagctccaaaaccgccatgaacatcgacggggtagaggcaaggccgcagtcgtaaaccgaagcaccatacgtcgtaaacgcgcggaacagcgccgccgcaatacggtctgcggaaatgcgggagtcatggccgacggcaattttcagcccctcggcgcacttatccaggtgcttttcgcaccaaacgagaaaaccggccgcaatgcgctccacgacctcatcggtcaggttaatcggcgcgctgccgccttcacttgcaacaccgcgaatgtcagtgccgcttttcaaagttttataggcaaacatggaaaagacctcctgtttcattttgcattttatccaagcttattataatacaactcccgtaaaatgaaaagagctttttgatttttgacaaatacgttttagtttggctaaaaaccgcttacaaactgcaagttgcaaactgagaaattgcaaatttcgtgtaaaatcaaaaattttttcaaaaaagtgttgacaaaatgaaattttggtggtataaacttagcataataattcaagggcacagatgaagagaagtacccggcagaccgctttgcacagtgagcgggggagagtgtgaactccgcgtaagcacaccggcgaataacacttcggagcctcaagccgaaaagatgcgcatatctcagtaggtgcgacgtgtggcggcgcgttaagccgtgcctgtcttgttagagacagtaaaggtgatcttctttataaggtaatttaggtggcaccgcggatacaacagctattcgtcctaagaaattgggacaaacggctgtttttttatttgcgtttggactgaaattattttatttggagggaaccgatatgtgttcgattatgggttacacagcaaaagacattcgtttggaagatttacgaaagggctttgataaaaccgtttcccgcgggccggatatgtcccgcacactggaaacgcctgcaggttggctctttttccaccgcctcgccatcatgggccttacagaagaaggcatgcagccgtttgagctggacggttccgccgtcgtctgcaacggcgagttctacggcttccgttccgttaaagaggagctccggagaaaaggctacaccttcaaaagtgattccgactgcgaaattttgcttcctctctacaaagaagagggcgccgagatgttcaagaagctcgacgccgagttcgccctgattatttacgatgccgagaccgatagcttcatcgctgcgcgcgaccccatcggcatccgcccgctctactacgggtacagcgaaagcggccacattatgtttgccagcgagccgaaaaacctcgtcggcctgtgccatcgcgttatgccgttcccgccgggccactactataaggacggcaaattcacctgctactgcgacatcgccgaagtcgaagaagtttgccacgatgacctcgagaccgtctgtaaaaacatccatgataagctcgttgccggcatcgaaaagcggctcgatgccgatgccccgctcggttttcttctcagcggtgggcttgatagctccctcgtctgctccgtcgcggcaaagcttttaaagaagcccattcgcacgttcgccatcggcatgagtgaagatgccatcgatttaaaatacgcccgcgaagttgccgattacattcacagcgaccacaccgaggtcatcatcacaaaggacgatgttatcgaaaacctcgaaaccgtcattgcgctgcttggtacgtatgacatcaccaccatccgcgccagcatgggcatgtacctcgtctgcaaagccattcacgagcagaccgatgtccgcgtgctgctcaccggtgaaatttccgatgagctcttcggctacaaatatacagatttcgcccccagtgccgccgcgttccaaacggaagcccaaaagcgcgtgcgggagcttcatatgtacgacgtgctccgtgccgaccgctgcatctccgccaactcgctcgaagcccgcgttccgttcggcgacctcgatttcgtcaaatacgtcatgtccgtcgatcccgagatgaagctcaacaagtacaaaaaaggcaaatacctcctgcgccacgcgttcgagggcgattacctcccgctgccgattttgtaccgcgaaaaagccgcgttctccgatgccgtcggtcactctatggtcgattacctcaaggcctacgccgaaaccaagtataccgatgacgaaatgaagctccgcgccgcaaaatatccgttcgcaacgccgtttacgaaagaatcccttctctaccgtgaaatttttgaaaaatactatcccggtcaggcggaaatggtcaaggacttctggatgccgaacaaagcgtgggagggctgcgatgtcaacgatcccagcgcccgcgtgctcgcgaactacggtgcctccggcgaatgattgaaaagattcataaactttctcaaagtttaacaaatttactgaaaatttaacctgaatgcaacacaccttttttccgtttagcccttgtgtattctctgctgttgtgatagaataaagccatcataggatattatggttttccacatagaaccctatcggcaaaccataatgagactaaatctcatatcgaaggagagatgactgatgtccaagatgatcgaacttcacgacatcgatgttccgggcttcctgtctgtactggatagttgcgagggcaatgtgtatctgatgacgcgcgacggtgataagctgaacctgaaaagcaagctgtgtcagctcatcggtcttacgtctctgattgaaggcggaaagatcgcagaagcctttgtggtctgcgataatgaagcggatgaatccaagctgttccgctttaacctttacaaggacgaaacgcaaggtaagtaaagagtaggatttgcaaagtaagctgctgcaagtaaaaactgcggcagcttttttgtatcacgtaaaacaaattatgtaaacaaaaaggagagactcatgccacaaaaaagaaccggcgcagcccgtcgccgccaaccccggaacaaaaaaacgctttccgccgtcatcagcgccgtccttgtgctcgcggcggtgcttgtctattatttcccggagcttgaaacgtacctcaccggtgcaccgaacacagactcaagcgcccccgaacagcccactcaaagcaccgacgccgccgactgcgccgtctactttttagatgtcgggcagggggatagcattttaattcaaatcggcaccgattacaacatactcattgatgccggcacccgcgaagcaggagagaccatcgaaagcgaccttcaggcgctcggcgtcacatcgttcgatgccgttgtcgccacgcacccgcacgcagaccacatcggctccatgaagcagattatcgaggattacaccatcggcacgttctacatgccccttttgcccgacgaccaaacgcccaccaccgctacatacgaaaatatgctcgatgccctgctcgacaaaaacgtccaaaccgagcagatctccaccgatacaaaaatctccgcgcccgaaaacgccaattttgccgtcctatccccggaaaaggacgagatattcgataacctcaacaactattccgctgttctgcgcttcacctacggcaatatctcctttatgctcaccggcgacgccgaaaccgaagttgaagagaatatcttagcacgcgaaacggacatcacttcaaacgtcttaaagtgcggtcaccacggctcgtccacatcgtcctccatggattttctccgcgccgtgaaccctgctgtcgccgtcatttcctgcgggcaggataataaatacggtcacccgcaccacgaaacgctcgaaagcctttctgaacgcaactgcaagatcctgcgcaccgatacagacggcaccgtcgccgttacaacggacggcaatacgtattccgtctatacgtggtcggcggaaaacggactttctccggcagcgtaagttcgcgtaaaaaattttgacgaaaccacaaatctatgctatactgataaaaataaattccgacccatgacggaaataaaggatggtttttatgctgacagaaagcaaaaaggcgtttatcgagttcatgatgtccgcagacgtgctgcgtttcggctccttcgtcacgaagagcggccgcaatacgccgtacttcgtcaataccggcaactataagaccggcgagcagatcgcaaagctcggcaagttctacgcatcgctcatcaaggagaccgtcggcgaagatttctccgccatgttcggcccggcgtacaagggtattccgcttgccacagccgccgccgcgtccctctataacgagtatggcatctcgaagccctacttcttcaaccgcaaggaagagaaagaccacggcgaaggcggcagcctcgtcggctacaagccgaaggacggcgataaaattattatcatcgaagacgtcatcaccgccggtaccgccgtgcgcgagaccatgccgatcctctatggctgcggtaatgtgaaagtcaacgatatgttcatctccgtcaaccgctgcgaggtaggcaaggttcccggcaaaaccgccatcatggaggtcaacgaggagttcggcatcaaggtccacgctatcgtcaccgtcgaggacatccacgagtacttaaagcagtccgaaaaatacaacaatatcctccccgccatggaagactacatggcaaaatactgcatcctgtaaaattaacaagcgcataagaacaccccggcaagccatccaaaccgcctgccggggtgttttcatattatctcgactaaattaagctcttttactgtctcgcaccctgcttggctgctctgtgcggcggcgcgttctgcgggcggcgtggcggtctttgtgcgccgcctcacgccgctttctgcggtgattctggaagaacctgctttgcagcaaacgccgcgtgtggtgctctgcaaaatgctccataaaatggttcgtctgcaccataaagacgatcgacacaatgagcagcgggatcaaaataaacagcatcggggcggtcagcggcaccatggaaaccaggtccatgcagccgatgtatcccacaaagaacgccgccaccatcgtgccgaacagcgccccacgcagcgcgttgaacggcaggcaaagcttgaacatcagcataaacccaacggcaaacgccacaatgaccgaaagtgtcgagacctgcgggttcgtcaaattcagcggtcccttaaacagcgtcaaaaacaaaacgccaagaatcatcgtcagggcagaggggaacgatttcttcaaaacgttcgctaaaaagctgccgcttatacgctcgttgttcggctccagcgccagtataaacgacggaataccgatcgtaatcgaactgataaacgtcagctgaatcggctcaaacgggtaggaagcagaaagaaaaatgaacagcacacccagcaccgtcgaatagatcgtcttctgcaaaaacagcgatgcggagcgttgcaaattgttgatggagcgcctgccttcctttaccacctgcggcatggaagcaaagttggagtcgagcaaaacgaggttcgagaccgtgcgcgccgcgtcgctgccggaagccatcgcaatgctgcaatcggcctctttcagcgccagaacgtcgttcacaccgtcgcccgtcatcgccaccgtgtggccgtggtcttttaacgcctgcacaaatttcagtttctgctgcggcgtcacgcggccaaacacactgtattgctcaattgcccccgcaatctcctcgtcggtgtgcagcgtcgttgcatcgcagtagttttccgcgtggggcagaccggccttctgtgcaatgttagagaccgtcacggcgttgtcaccggagatgaccttcagcgtcacgccctgctctgcaaaatagcgcagcgtttgcggtgcttccgtgcggatcttatcactgattaaaatgaagcccaccggcttaatgtcgtccggcagcatcttgttttcaaggaaaggctttgcggagtgggccagcagcaaaacgcgttcgccgcgcgccgcatattcctccgtgtgttcacgcagcgcaccgaagcgttcgcccaaaatgaattcgcctgcgcccatcacatacgtgccgcgctcgccgaaatacgcgccgctccactttctcgcagaggagaacggcaccgtcgccgcagctttccagtccgatccgccgggaaagtatgctttcaccgcgttgtacgtcgggttgtcgtccgtcaaaacctgcacaagcgcctccagcggagccgtcatgtcctcttcggtgtagcccgtcagcgggtgcagctcgtccacctgcatcgtgccctcggtgattgtacctgttttgtctaagcacagcacatctacgcgtgccagcgattcggtgcagtacaggtcctgcaccaacgtcttgtagcgtgaaagccgcagtacgctcacggcaaacaccacgcttgtcagcaaaatgagcccctccgggatcatgccgaggatcgcggcgaccgtgctcacaacagcttcgcggatcgtgtcatgcagcaaaaaaaactgcttgcagaaaagcaaaatgccaatcggcaccagcgtaaagccgagcgtctttacaatgaaatcgagggaatggagaatttcggagttcgtgcgcttcacatacttcgcgccgtttgcgatgcggtttgcgtagttttcgcggcctacgtgctccacttcggcataacagctgccggaaacgatgaagctgccggaaagcagctcgtcacctgcgcgcttcaagaccggatcgctttcgcccgtgatgagcgattcattcacttccgcttcgccatccaaaacgatggcgtcggcgcagatctgctgcccggtcgaaaggtgcagcacatcgttcatcacaatcccgctcacgggtatcgtctgcagttttccgttgcgcagcacagaagccttcggtgcggaaatgagggagagcttgtcaatcatccgtttcgctcttatgccctgaaacgaaccgataataatattagaaaagataacgcccaaaaataaaaggttcttaaacgagcccaccagcaaaacgaacagcgccagtacaaagttcaaaatgttaaaaaatgtgaacgtattctctaaaatgatctgcttttcggttttggtcttaatgccctcatcggcgtttgaaagcccgtcgcgcacgcgctgcgctacctgctccgaagaaagcccctgtctacggtctaagctatccatcccgttacgatctcctttttcttatctagatataagaatacacgatacaccacccgaatgcaaggatataaaacgtaaatttctcttacgattttgtgaattctttccttttgcttgtagaatatccgcaaaaaacaaattaacattttatggaaaaagtcaattcagttttcaagtctatcctgaaatctatccggatttttgacacttttcacgatagagagataaaaacccgtcaaaatctgccgtaaacagcaaaattctcattgtaaaacccgcagataaaagcccttgtggccgatttgactttgcaggaatttatgattatacttaattatcgtacatagaaaatcagaaaatgatatgcgaaaagcataggtttattcataaaggagagatcattcatggcagaaaagacagaaaagaaatacgttatcacaaaccatagaagcggtaaggttctcgcttcctgcggcggctctgccgtgcagatgaccgcaaacggcggcgaaacgcaggtctggtgcgccgtcccggcagagggcacgtccgtgcagctcgtccataaggccagcggtctcgtgctcaccgttccgggtgaggcagaaaacggcaccgcactcgttctcgcagaggcacagggcaacgcttcccagctctggaagctgaccactaccgtcaagggctgccgccgcatcacgcatgtcgcgtccggcaaggtcgtcgacatcaaggacatcagcgatgcagacggcgcaccggcacagctttgggagtttgtgaagggcgataaccagaactgggtgctcaccgaggtcgaaaaggaaaagaaagccccggcaaagtgcgctgcaaaaaccgcaaagccggctgcaaaagagaaagctaaggcagaggtgaaagcggaagccaagccggaagtcaaggcagaagtgaaagccgaagccaagcccgtcgccaaaaccacaaaggcagccgcaaaaaccaccaaagccgcaaagaaaacgaagtaagttcgtttagctgagagccgcacccaaaccgggcagcggctttctttttttacccaacattattctaaaaagcgtgatcatacccaaattttcacaaaatcgccttgcgccgcccgtcaacagctgatatactaaagacagtatggtttatcctgcaattttgcggccaaaggagttgtctttatgatacatgaaaaaatcgaactgcacgtgccgggctctgcggattacgcagccatgtatacgtattttctggatctttcaaaagaggttcccatcgaaaagcgtcccaccgtcatcgtctgcccgggcggcgcgtacgcctttacgtccgaccgtgaagccgagcccatcgccatgcgcttcaatgccatcggcatgaacgccgttgtcgtgcgctattccgttgccccggcgcgctttccgactgcccttctggaagtcgccaccgccgtgaaatacgtccgcgaagaaggcgcaaagtacggctgtgaccccgaaaaggttttcaccatcggtttttccgccggcggccatttagccgcaagctacggcaatttctggagccgcccgttcgttgcggaggctatgaactgcccgtccgagcttctgcgcccgaacggccagatcctctcctatccggtcatcacgtccggcccgttcgcccaccacgattccatcaagaaccttctcggcgagcagtacgagctcgaaaaagcgaatcagtcgctcgaaaacttcgtcacgaaagataccccgcccacgttcgtctggcacacccagccggatgactgcgtcccggtcgaaaacgccctgatgctcgtcagcgccttgcagaaaaacggcatcaaaacggagttccacatgttcccggagggcggccacggcctgtcgctttgcaacgaagtcacctcgaacagcgatgcccagctcctgccgcacgtcggcaagtggttcgacctcgcagcggagtttttgcagagcctttaatcaccgattttccgtaatcgcgaacgaataaagtctttgatcgaccttttctaaaaggcttcgccttttcaggggaccccttgatagggtcccctacaccgaaacagtccactggactgtttcggctaccctcctgatcttggagcaggcaaaaggatttcgctttctgcggaaagcgacttagggcgctgccctaagaccccgccgcctttgaaaaggcgggcgaaacgtttacgttccgcttaccgatacctcatttatgaaataccgaaaggaatcatcccatgaaagccattgatttggaagtcaagcgcatctgcgaggaaaagctcgcaaatgacgcgaagctctcggagctctttaaaaattgctaccccaacaccatggataccaccgtcaaaactatcggcgaaaaagataccttcgtcatcaccggcgatatccccgccatgtggctgcgtgattccaccgcgcaggttcgccactatctgcccgtcgcaaagcacagcgcagaggttgccgattgcattgagggcctcgtgaaccgccagttcaagtgcattgatatcgacccctacgcaaacgcgttcaatcaggaagagaacggcatgtgctggccgaaatacgctgcggaaacgctcggtcagaccgccggcggcgagtccgacgataccgatttcgagaccccgtgggtctgggagcgcaagtatgagatcgattcgctctgctacccggtgcagctcgcataccttctctggaaagagaccggccgcacgggccagtttaacgaccagtacaaaaagagcaccctgcgcattctcgaccttttcactgtcgagcaggatcacagcaagtccccgtactatttccgccgcaccaactgcccgcccaccgatacccttacgcacgacggccacggcgcgccggtcgccgttacgggcatgacctggtcgggcttccgtcccagcgacgacgcctgcgtctacggctatctcatcccgtccaacatgttcgccgtcgtaaccctcggctacaccgcggagatcatgcgcgagatctataaggacggggaagtcgccgcccgtgccgaaaagctcgcgtccgagatccacgccggcatcgaaaaatacggcgtcgtcgagcacccgaagttcggcaaaatgtacgcctatgagaccgacggccttggtaactacgtcttcatggatgacgccaacgtcccgagcctcatgtccatcccgtacctcggctactgcagcgccgacgacgaaatttataaaaacacccgcgcctttgttttgagcaaagaaaacccgtattattacgagggcaccgcggccaagggtgtcggcagcccgcacaccccgccggagtacatctggcacatcgcgctttccatgcagggactcacaagccgtgacccggaggaatgcaaagcgcttctccacatgttaaaaacgaccgatgacggcaagggcttcatgcacgagggtttccataaggacgacccctctaagttcacgcgcccgtggttcgcatggtcaaactccctgttcagcgaatttgtcttaaagtgcatggatgaaaatattctataattaaggagctgtttttcatggcagatttttacgcactcggtgaacttctgatcgattttacccctgcaggcaaaacgccggccggcatcccgatttttgagcagaaccccggcggcgcaccggcaaacgtcgccgtgcaggcggcgcgcctcggtgtatccgcaggcttcatcggcaaggtgggacaggacatgttcggcacgttcctgcgtggtacgctcgttaagcaaaatgtcgatgtcgaaaacctccatttctcaaacgataccgcaacgtcgctcgcgttcgtgcagctgtccgaatccggtgaccgcgatttcagcttttaccgtaaccccggcgccgatacgcaaatcacgttcgatgaggtcaataaggatgcgctcgcaaacgccaaggtgctgtgcttcggctcgcttctgctcaccgcagagccgggtcgcacggctgtgccgcagattgtttcctacgcccgcgagcacggtgctatcaccgcctacgacccgaactggcgcgcaccgctgtggccaaatgccgaagccggcatccacgccatgaagagtctgctgccgcttgccgatgtcgtcaaagcgtccgatgaggagcttgaaatgctcaccggctgcaccgagatcgaagcgggcgcaagggagttctttaagctcggcgtgcaggcggcggtcatcacgcgcggcgcaaagggctgcgttgtctgcaccccgaaaacaaccttaacgctcaacacctacgatacaaaagtcgtcgataccaccggctccggcgacagcttcttcggtgcgttcctcacaaagctcatggagaccggcaagcccgtttccgagatcaacgaagccgagctgcgcgacgcggccgattttgcaaacgccgcaggctccgtctgcgcgacgaaaaaaggcgcgattcctgcgctcgccgaccgcgaattgatcgaaacgtgcagagcgtctatcccgcttttaaaactgtaagccatttcccgcaaaatccgctttgcacggctgcggcaaggtcgtattagaggggcacatcaagcacggcgtgcgcgacggcatcgagcacggcgacgcagataaaatcatcgaaaacttcacaaaagctgtggaacgcttctccaatatgggctgatcccggctgaaaatcaaacaaaacagcgaagtgcatggggatacccacagcacctcgctgtttttaggttctctcgcattccgtcttttttaaatttcctttttcgggctcttaatttaagctcaatagtcaaaaactatcgtgcggcagtcttcgcagatattcgcctgtatccgcacgcggtggctcggctttaacggcgtgatctccacaaagccgtcggcgtttttggcgttttcaaatacgccgggcacggtgttcgcaaagctgaacgcgccgtccttgcttgtaaacaagtatccctcgcgcatcgcttttccgcatttcgggcaattcatagaattcttctcctctctgaatgtgtaacaattttgcggaagcaaaccttacggctcggcagggtgttggctcatctcgagcgctttctgcatttttcgctcaaagtcttctgctttcacaagggcaatgccttcaccctcgtcaccgagcacgatcagtcggtcgccctcctttaagtcaaacatttcccgcgccgccttcggtatgatgatctgcccgcgcgcgccgagtgtcaccgcaccccaaaggtgcttgcccgcaggggcaggggcgagggccgtgtggcccactcggttttggtcgtgcaaaagcgcgtccagcgtcacgccgtagtgccttgcaaggcggtcgcatttttcaatgtccggcacggtttcgccctgctcccacttggagtaggactgccgcgtcaccccggcgatttccgccgcctgctcctgcgtcagccccttaaggccgcgcagcaaaatgagattatcggcgagcataagctccacttcctttctgcattcagtatatcgctgcgcagtgaaattttccaccaaacaaacgatacacacttctcaatttcatgttaagttaaactgccttgagggcataaattgtgcccgaagctttggcttcctgacgccaaagcacgggtttcctgcttgtacaagacccgtgatgcacgttcagagatccagacgcaccgtcgctgaaaaagaccgatatcggcattgcgatgggcggtgtgggcatggtcgttataatcgtgaagctcgttttggatataaggaacggctaatcgcatctctttccgaataaaaccataacgatagcttgcagaaaatgcagactgcttttgtttatatgcgcctaaaattaaacaatatatcttgattttgtggtgaaaacacgctatactggaagcgatataaagaaaagagggcgtggaaaatgaaacggaaattggagagcatggaagaccttttgcaggcggtggaatactacggttttctgccgttttttccgaatgacattccgggcttttcggtggaggagatgtgcgcgccggcgtattggttcgctgaagaccgcgacggaccttgggagtggaaaggcccggcggcgcagacgaagcgctgcgcgtacggcaagcttttccggaaaaaagcggggtttgtcagccgggaatggctgccggagcttgtaaatttccgccgtgacggctatgattttgacgcgcgctgcgatgacggactggtgttccacaaggacgaggagttgtataacacagtcaatgcggagggcgaaattctttcaaaattcctcaaaaagaagctcgattaccgcaaaggcggcaacacgggctttgaaacgtgcatcacgcggctgcaaatgcagacgtatttgtgcgtttcggattttatccgcctgaaggataaaaacggcaggccctacggctgggcggtggcgcagtacacgacgccggagcatttattcgggtacgattatgtgacgtctgcgtataagagcgaaccgaaggtctccgaagaaaaaatgattgcacaccttaaaaacctgcttccggcgacggaagtgcagatacaaaaattactaaagtagttgggaggaaagcgtatgcttcaacaagttatgacagagccgggcaagatcattttccgggaaattcccgtgccggaaatcggggacgggcaggtgctggtgaaaattatggacatcggcgtttgcggatcggacatccacgtgtaccacggcaagcatccgttcacgaaataccccgtgacgcagggacatgaggtctcgggtgaaattgtaaagtgcggtgcgaatgtcgaagggcttaccgtcgggcagaaagtgacgattgagccgcaggtgtactgcggcaagtgctatccgtgccggcacggcaagtacaacctgtgcgaggagctgaaagtcatgggcttccagacgacgggcacggcttccgaattttttgcggtggacgcaaagaaagtgacaccaatccctaaaagcatgagctttgaagagggcgcgatgctggagccgcttgcggtggcggtgcacgccgtgcggcagatgggcgacgtgaccggcatgaacattgcggtgctcggtgcggggacgatcggcaaccttgtggcgcaggcggcaaaaggccttggcgcggcgaaggtgatgattacagacgtgagcgactaccgtttggagaaagccaaggaatgcggcgtggatatttgcgtgaacacgaaggagaagaacttcggcgaggcgctcgttgaagcgtttggcccggacaaggcggacgtcatctatgactgcgcgggcaacaacgtgacgatggggcaggccattcagtatgcgcgcaagggtagcgtgattgtgcttgtggcagtgtttgccgatatggcgactgttgatctggctgtggcgaacgaccacgagcttgacattaagagcacgatgatgtaccgccacgaggactacgtgggcgcgatagagctggtggaggcgggcaaagtgcagttaaagccgcttatctcgaaaattttcccgtttgcgcagtaccttgacgcgtataaatacattgacgcgaaccgcgagacgacgatgaaggtcatcattgccgtgcaggaaaaataaacggaaaaagaccgggaaacacgcgctgtgcttcccggtcgattttatgtcgtggattctactcagccttcaaaccgctttgcggcatcttcgagctcttcgatgatgtggatgtgctgcgggcagtgcgcttcgcaggaaccgcaatggagacattcgcttgccttgccgccttcgcgtgttgcggattcgtagccgctgcgatcgacattatcctcggagccgaactgcttctggtggtttacggcgcggaaaatgtccgggatgtggatctgcatgggacagtcgtctacgcagtaccggcagccggtgcatggaatagtgggaatggcgttgagtttttcgacgacggttttcagcacctcgtgctccttgtcactgagcggctcaaagtgctccatgtaggagacgttatcgtcaagctgcgctttggtgctcataccggagagcacggtgaggatgttatcgagacctgcgcagaaacggacagcccaagacgggatggaaagatcaggattctgtgccttcatgatgccctgaatttcgttgttcatgcttgcgagggaaccgcccttgaccggctccataacgatgatgggtttattgtgcttgacggcgacctcgtagcactttctggactgcacgttatcgttttcccagtcgatgtagttgagctggagttggacgaattcgacttccgggtgcttggtgagcgcttcgtcgagcacttccgcgctgtcgtggaacgagaatccgcagtgcttgattttgccctgtgctttcatcttgaaaaggaagtcccacgcgccgatgcggtcggctttctcgaacttcgctttgtccatggagtgcagcaggtagtaatcgaaatactcgacacctgcgcgttccatagattcatcgaaaatgcgctgcatgtcggcttccgtctctatgttgtcccaaagggggagctttgtagcgagcgtgaagctgtcacgcgggtagcgctttacaatggcttcgcgcgctgcgacctcacttttgccgttgatgtatacgtatgcggtgtcaaaatacgtaaagccctttgccatgaaggtatcgaccatggctttcacttgctccatatcgatctcgtcgccgatcatcggcagacgcatgaggccgaaaccgagcttcggggtcgtatcgccaagataaccagtgttcattttgaattcctcccgagaatagttgtgccgtttcgtacaacacattaaagtttactgtaagtttgattatatcacaaaacacagaaattgcaagaagttttttcgaaaatgcaaacactttttacataaagtgtgcaaaagataaacaaactcgcagcgcttgacggtattctgcttttgcagtacaatagaaatgttaagtttaaaaggagagcgagatatgagcggggagagacaaagacggattaagcgggccttggcaacggttttcggtgctgcggctgtgcttgtcgttttgtatattcttcgtccgccatgcctcgtccgcaaggttttcggcgtgctgtgtccttcctgcggaacgacacggatgatcgcagcgcttttgcaattggactttgccggtgcgtgggcgctgaacccctttatgctgttctttttgccgtttgcgctcctttggggcgttttggaagcggtgcggtatgcaaagggcaaaccgccgctgctttttaagcgcttttccattgcgctgtgggcggcgtggttcctctcggcgctcattttcggcgtatggcgcaacttcgcttaatttccttgacaaagcgacgcttcgtgtgtaaaatcaaagcatagtaaaaccgtatgcttttagttcttttgcggagggatgcaaaatggcaaaggaaatcacaagggaagaagcgtgggcactactcacggcgtacaacaaagagccgttccatttgaagcacggcgagaccgtggagggcgtgatgcgttggtacgcggaaaagcacgctcgacttggagcttaaatccgtaaagaaaaaatacaaggcgctcaactttgccgcgggctgctcccgtgaggtcattcagcgcggtgcagatatgctgggccggacgctcgacgacctcatttccgacacgatccttgcgatgcgcacgctggaaaagccgcaggcggagtgagcgacaccgaataaagaaaggcggaatttcatgaccgcaaatgaaattaacgctttggtcgaccgtctgcgcgagcagcgtaacctcagcgatgcggaatttaagacgattttggagaccgacgcctatgatgcggcgctgcaaaaggccgcggacgaggtgcgtcgcgcgcactacggcacggacgtgtacgtgcgcggactcattgagtttacgaattactgcaaaaataactgttactattgtggcatccgtcgggataatcgaaacgcgacgcgttaccgtttgacgaaagaggagattctctcctgctgcgcggaggggtacgacctcggctttcgcacgttcgttttgcagggcggcgaggacccgttttacacggatgacctcatctgcgagattgtcgcggccatccatgcgcagcacccggactgcgccattacgctttccatcggcgaaaagagtcgcgaaagctaccagaagtattttgatgcgggcgcaaaccgctatcttttgcgtcacgagacggccgatcccgagcattacggcaagctgcacccgaatgaattgagcgctttacaccggcaagcatgtctttttgatctaaaggacatcgggtaccaggtaggttccggctttatggtgggttcgccgtatcagacgacggagaatcttatttctgacctgcgctttttgcagaagttgcagccggacatgatcggcatcgggccgtatatcacgcacgcgcagacgccgtttgcaaacgaaaagagcggctcgctcgagctgacactgcggcttctctcaatattgcgtttgttgtttccgtatgcgcttttgccgtctacgacggcacttggcaccattcacccgcaagggcgtgaactggggctgaaggcgggcggaaacgttgtgatgccgaacctttcgccggtgcgcgtgcgaaagctttatgagctgtacgagaacaagatctgtacaggggaagaggccgcgcagtgccgcggatgtctggagcagcgcgtgaagtcggcgggctatgagatcgtcaccgcgcgcggcgatgtgaaacgataacgaaagggttttaccgaaactatgtgtaaaaaagcgatcatagccatgagcggcggcgtggattccagtgtggcggcgctgcttatgaaagaaaagggctacacctgcatgggcgcgaccatgaagctgtaccagaatgaggacgtcggtttgcgccgcgagcatacctgctgttcgcttgatgatgtagaggacgcgcgcagtgtggcgtatgcgcttgacatgccgtactatgtgtttaattttgccgaccgcttcaaaacggatgttatcgacaagtttgtgcactcttatgaaacgggtgtaacgccgaacccgtgcatcgattgcaaccgctatttgaagtttgataagctgtttcagcgcatggttgagctgaattatgattatgttgtcacggggcattacgcgcaaatcgattttgacgaaaatacggggcggtatctcctgaaaaaggccgttgaccacaataaagaccagagctatgtgctgtggtcgctgacgcaggagcagctaaagcacgtgcagttcccgctcggcggcatggagaagtgtgaagtgcgcgcgcttgcggaggcgcacaatttcatcaatgcgagaaagcacgacagtcaggacatctgctttgtgcagaacggttcgtatgccgatttcatcgagcagtacacgggcaaaacgtacccgcccggggattttgtggacacggatggcaacgtgctggggcaacaccgcggcgtgatccgctacacgatcggccagcgcaagggcctgggactcgcgctgccggcaccgctgtatgtgaaatcggtggatattgaaaagaacaccgtgacgctaagcccggaaagcgagcttttcaaaaaggagctcacagcgagcggcattaatttgatttccgtcgcggaaatcaaggagccgatgcacattaaagcgaaggtacgctaccgccagcccgagcagtgggcgaccgtgacgcagacaggaccggacagcctgaaggtcgtctttgacgagccgcagcgcgccatcacctgcgggcagtccgtcgtgctgtacgacggcgaccgcgttttgggcggcgggacgattgattcggtgaaataaaaaagcctgaacaagcgctgcttgggtattgttttgtggggaggaaaactcaaatgaatgatgcgaagaagcttttggcggatatgaaagcgctgggaatcaaagagggtgagacgattttggtgcacgcatcgatgaaggcgttggggacaaaggagacgccggagacggtgctcgacacgttgcaggcggcgcttggcgacgacggcacgctttcgctgcctgcgctgacgtatgagaacgtcacgccggagcacccggtgtttgacgcggacaaaaccgtgccgtgcatcgggcttttgccgcgcacgttttggaaaatgccgggcgtggtgcgcagcgtgcacccgacgcactccgtttgtgcgcgcggcaagtgtgctgcggagctgacagcattgcatggggaggacatcactccagtggggaagaactcgccgtttatgaagctgccggagatcggcggacggctgctgttcatcggcgaggtgcttgactgctgcacgtttatgcacggcgtggaggagcgcttcggcacggactacgtcttgacgaaggagaagatccgctacgttgtgaacggcgaggaaaaatacatgtacggccacgattttaagggctgggagacgacgtaccgccgcgtgaaggagattctggaccccgcgaaaaatgagatcgtcacggggaagatcggcgacgcgacgtgctaccttatcgacgcgaaagcgcttttgaagcgtgcagaggaaaagctgcaggaaaaccagcactggtttgtggtgccacgggagtaaaaccaaacaggcataaagaaacgacccgggacggagaaaattccgtttgcgggtcgttttttgcgttgtgaaatttgaaaactcagcctaagtcgatggagcgctgggcgcaggcgttcagctccatgccggcggtatggccggcgagatattcgtagtaggcctgtgcgccgaccatggcggcgttgtcgccggtgagagagaggtcgggcatatagagcgtgcggccggtacgcttgcattcttccgtgaggcggcggcgcaggagcgcgtttgcggagacgccgcccgcgatgacgagctttttatggccggtctcgtctgcggcgtgcaggaagttgcgcacgagacaatcgacaacggccttgcggtaagaggcggaaagatcggcgatattgacggtctggcccttttgctcggcattatgcagaatgttgatgacggcggtcttgaggccggagaagctgaaatcgagcggggcgccgtctacggtcgggcgcgggagcttgaacgctttgtcgttgccggtctcagcgagtttatccatggcgatgccgccgggatagggcatgcccatggcgcgcgcggccttatcgaacgcttcgcccgcggcatcgtcacgcgtttttccaaggatgcggagctttgtgtagtccgtcacttcgatgatgtgtgtgtggccgccggagacgacaaggcacaggaacggaggctcaagttccgggttcgtgatgtagtttgacgcgatgtggctgcgcaggtggtgcaccgggatgagcggtaaatttgcagaaagagagaggcctttcgcgaaatttacgccgacgagcagcgcaccgatgagccccggcgcgtaggtgacgccgatggcatcgaggtcgtttacggtgagctctgcgcgctcgagtgcttcacgcacgacgcctacaatggcttcgctgtggcggcgcgaggcgatctccggcacgacgccgccgtataacttgtgttcttctacctgcgttgcgacgacgctggaaagcacgcaacggccgttttctacaacggctgcggcggtctcatcgcaggagctttcaatggctaaaattttcatttttctatcctttggtctttgatttgcggggtgaaccgcggaaatattcggctcagtcgagaccgatgagcagttctttgagcgcatcggaaacaggcgcgccgtattcgctcacctgccaactttcggcaaagcgaacgttttttgcaaattctgcgccgtactggcgggtgaggcacgcgagcacgtcctcgtccacgtcaccgcggtcccagttgaacgtactgcgcaggtactctacgcgctcctcgtgcgttttaccggcgagattcacgtggtcatctgcccacggaagccaatcgaggaactgggaggcgtggcagcactcgacgtgaaacagcgtttcgcggtcgtcatccgccgggcgggcgaaatcggagcggaacggtttggggtcggtgaagccgtctgcccagtaaagaatggtaggcgttttgcgcagcacgggggtatccgggcaaatggcgggcacgcccatgaggtacgagcagtcctgcacgagctggcccgtagcgcggtggtcggggtgataatcgcacgcgcggttcgtgaagatgacgtccggcttaaaattgcggatggtgcgcatgagcgtttcgcgcgcttcgagcgacggggtcaggcggccgtcgtcgaacggcagaatttcataggtggcgccgaggtaggcagcgcttttttgcgcttctgccgcgcgcgttttgatgagctcttcgccgcgcatggtctggtggcctgcgttgccggtcgtcatggagacaaagcggacaatgcagccctttgaaaccaagcgctttgtgatgccgcaggtgcagatatcgacatcgtccgggtgtgcgccgatcatcatggcgcgtaaaggttctgacataataaagccctcccaggagaaaatgagatcaatacaaccgccgcggctgttccgcgactttttctcatttattttagcacaaggcaggcgcgaaaacaagcccgcacaacgtgcaaagcgaggaaaatgcgcggggatgaaaattttctctttactttttgaaaaccgtgtgctatactccgttttaacaagcgatgaagagtgacagtagggatccgggaatggcacagagagccccgtaagctgcgatggggtgcaggaacggatcaccgaacaaagccttggagctgcataccgactgcgtttttgcgctgagactatgccgggcgtgcccgttacagcacaggagtatcgatgttttccgtacttttcctgcggcgaagtctgtacttgcaaaggcgtgcgtcgtgaggcgcgggcaaactaaggtggtaccacgggttattgtatcccgtccttggaaacagggacgggattttttacgctctaaatttcccgcccgatgaaaataacagcacgaaagggtgtagaaaatgagcgaaaacacgttattggaagcaagaaaggcaaagttccattatgtacgggagcacgtgaacccgtacccggagcgctatgcgcggacgcatgagctgtgcgaggcggcaaaactgccggacggggtgcaggacgtgtgcgttgcagggcgtgtgacggccattcgacgcatggggaagctctcgtttttgacgctctccgatatggagggcaagctgcaaattgccgtgatgcgcgacgaagtgggcgaggacacgtatgactttttcaagaggggctttgacgtaggcgactttatgggcgcggagggcgagatgttcacgacaaaggtgggcgaaaagacgctgcgcgcgaagtgcatcacgtttttaggcaaggcgttccgtccgctgccggagaagttccacagtattcaggacacggagctttgttggcgcaggcggtacctcgatttgtgcatgaacggggagacgcgcaggcggttccttttcaagtcgcagcttgtgcgggagattcggcggtatttggaagacaacggctacatcgaaattgaaacgccggtgctcatcgatcatccgtccggcgcgacggcgcggccgtttgttgcgcaccacaatgcgcttgacatggacgtttatctgcgcattgcgccggagacgtatttgaagcgtgccattgtgggtgggtttacgaaggtgtttgagtttgcgcggtgctttcggaatgagggcatggacgcgacgcatttgcaggattttacgatgctggaaggctactgcgcgtactataactaccgcgacaacatgcgctttttgcaggacatgctgcaaacggtcattacgaagattcggggcagcgcggtcatctccattaacggcaccgagatcgatttcggcgcggaatgggcggtggtgacgttccgcgagctcattttaaaggactgcggcattgacattgacgagtttaagacggcggaggctttattgcaggaaattgaaagccggcacattgaattaaactccaccgacgacccgaagaagcttgggcgcggaaacctcatcgatttattatacaagaaggtgagccgcccgaagatgatcgcgccgacgtttctcattgcgcacccgacggacttgtcgccgctggcgcgcgcgaatgatgatgatccggagattacggaccgctttcagcttgtcatcaacggcgcggagatcatcaacgcgtactcggagcttgtggaccccaatgagcagcgccgcagactgcaaattcaggcgcagagccacgcggacggcgacgaggaagctatggtgatggatgacgactatttgacggcgatggaatacggcatgccgccaatttccggctggggcatgggcattgaccgcgttttgcaggttttgctcggcacgaggaatatccgcgacacggtgatgttcccgctgatgcggccggaaccgtaagcggaaaaaacagcgaaattctgcattttcaaattgcgtttcctgcatttttatgctatactttaacggtatatccatgaaaatacgaaaccgatacagaaagtgatgacttatgagaatttccgatattttgaagaccaataaggtgacggtctcttgcgagatgttcccgccgaagccgggcaaaccattggaaaacacacagcaggtggtgcatgagatcgcggcgtataagccgtcttttatgagcgtgacctacggcgcaggcggctccaactccaaaaacacactgtccattgcagaagaggtgcagaaaagcggcgttacggcgctggcacatttgacgtgtgtggggcaggacgaagagaacctcagagcgtccatcaatgcgtttaaggcgagcggcattgagaatattctggcgttgcgcggcgatattccggagggggacacggcgccgcaggcgttcccgcacgcgagcgacctcatcaatgccattcgccgcgagggtgcggatttctgcatcggcggcgcatgttacccggagggacacccggaatcgtacaacagcgacgcggacattgacggcgtgcgccgcaaggtggaaagcggctgcgagtttttaacgacgcagatgttctttgacaacaacattctttataattatatgttcaagctcctgcgccatgatattcgcgtgccggtcattgcgggcattatgccggtgacaaacgcgaagcagattaagcgcatcatgagtctttcgagttcttctatgccgacgcgctttaaggcgatcgtcgatcgttttgcgaacaacccggaggcgatgaagcaggcgggcattgcgtacgcgaccgagcagatcatcgatctcatcgcgaatgacgtgacgcatattcatatctacacgatgaaccgcccggatattgcgggcagcatcatgacgaacctttcaaagatcattgacggctatgaagctgaatgagaaagaggcgctgcgataccttggctttcgcgggaagccggccgatgcggacaccgaggagatgattcgcgagatcggcggcgagatgctgcgcacgctcacgccgaaatgcgtatataaaagatacgacataaaagtacttgagaacgcggtggagctggacgactggcgcatcgagagcataaagctttcacgccatttacgcggctgcaaggcagcgtatttgtttgcggtgacgctgggtttgcaggccgatatgatgatacggcggttatccgcgctcaatatggcgcgcggcacggtggcgcattccgttgcgaatgcgctcattgaagactactgtgacgaaatgcaggcgcagatcgcggaaaaggaagccgcaacgggcttatttttgaagccgcgctattcgccggggtacggcgactttgcgctcgaaagccaaaaagagatctttgcgcggctggaatgtgcaaagcgcattgggctgacgctgacggataccatgctgatggtgccgtttaaatccgtgacggcggtcatcggcgtgacggacgcgccgacatgcacatacgtaaagtgccgcggctgcgcgaacaccgactgcgagttccgcgaaatctgacgcgcagagaaagggagaaaatttatgcatcctgttatagaacgattcggaaaatctgttgtcattgtggacggcggcatgggcacacttttgcaggcaaacggccttatgggcggcgagctgccggagctttggaacctgacacaccccgaggtgcttttgaaaattcagtccgactacgtgaacgcgggctgcgatattttgacggcgaacatgttcggcgcgaaccgtttaaaactggaaaagacgggccacaccgtgcaggaggtcgtctcacaggcgttgaagcttgcacacacggcgagcggcggcaaggcggcggtggcgctcgacatcggtccctccggcaagcttttgaagccgttcggtgatttggcgtttgatgacgcgtatgagctttttaaagaggaaattatcgcgggcagggacaacgccgacctcgtgatcattgagacgatgagcgacgcctacgaagcgaaggcggcgctgctggcggcaaaggaaaactgtgacctgccggtcattgtaacgtttacgtttgacagcacgggaaagctcttgacgggcagcaacatcccggcggcgctgctgctggcggagagcctcggcgcggacgcggtgggcatcaactgcagcctcggcccggagcagatggaaagctttgtcgatgaaatgctgacgctgacgaatttgcccattgtcatcaacccgaacgccggtctgccggtttccgtgaacggcgagacctcgtaccccgtggggccggaggaattttacgcgtacatggagcgttttgcggagaaaggcgcggcgattctcggcggctgctgcggcacgacgccggagcatatccgactgcttgcagaacgcctgaaaaacaagccggtgaaggagcgtcacattgaaaagaagacggtggtgtcctcgtacacgcatacggtgacgttcggtgcgcgaccgattttgattggcgagcgcatcaacccgacgggcaagccgcgcttaaagcaggctttgcgcgaaggcgatttggaatatctgtgccgtgagggcattgcgcagacggaacacggcgcggacattctggacgtgaacgtgggtctgccggagcttgacgagcccgcggtgatggaaagggccatcatcaacttgcagagcgtgacgaacacgcctttgcagatcgatacctcgaacgtggaggccatggagcgcgcgctgcgtatttataacggcaagccgcttgtgaactccgtgaacggcaaagaggaatcgctgcacacggtactgccgcttgtgaaaaagtacggtgctgcggtggttgccttgacgctcgacgaaaagggcatcccggcttctgctgcggagcgtgtggcaattgcggagaagattttgaaaacggcggaaagctacggcatcgaccgcagcgacgtgattattgacacgcttgcaatgacggtgagcacgggcgcggataacgcgattatcacgctcgatgcacttgacaccatccgccacaaactcggcgtgcatacggtgctcggcgtctccaatatttcgttcggtctgccgcgccgcgagctggtgacctccacgttcttcgcgatggcgatgcagcgcggattaagctccggtatcattaacccgctgagcgacgagctgatgaaggcgtaccgctcgttctgcgcgctgatgggcatagacgtgggctgcaaggcgtatatcgaagcgtatgcgaacaccacggcggcgccggacgtgcgcacgggcgccgcgcagcagagcgcaggcgggtctgccgaaagcgtttcgctgcaccgcgccattgtgaaaggcctgcgcgagcaggcgggacagctgacggacgagatgctgaaaacgacgccgccgctggaaatcatcaacggtgagcttatcccggcgctcgacgaagtggggcagggctttgagaaaaacacggtgttcctgccgcagcttctcatgagcgcagacgcggcgaaggaagcgtttgagcgcatcaagcagaaccttgcgaaaaagggcattcaggaggaaaagaagggtaccatcatccttgcgaccgtgaagggcgacattcacgatatcggcaagaacattgtgaaggtgctgcttgaaaactacggctttgacgtactcgacctcggtaaggacgtgccgccggagatcattgtgcagacggcgatcgagaaaaatgtgcgccttgtggggctttctgccctgatgacgacgacggtggagagcatggcggagacgatccgccagctgcgcaaagcgcatgactgcaaggtcatggtgggcggcgcggtgctgaaccccgagtacgctaaggagattggcgcggatttctactccaaagatgcgatgggcagtgtgcgctacgcggaaaagctgtttaacggcgaagtgtaaaaacaatcaaagaatagaaaaaggacggcagttgcgcttaactgtcgtccttttttactgtgcaaaattatctgcggtttgtaaaccacacgtcgatctcatcgggtatgggggtctcaaaaagcgtgagaactttttgcagcaggccgctgtctacggcgtagtcggtcgtttcaccggcggcaacggcagcgttgcgcgcttcaatgtttttcgcccagtctgcatcggaaatgtcgatgtagtgccactcgaagtcgatgtcggcatttttgtagtaggcggaaacatctgtgcgctctttgcggctccagaagccccaatctaaaatgacattgcagcccgcgcgggcgatgtccacggcttttttgtggagatacgctttgatgtccacgctaatcgcatcgcggcggtcgccgaggtcatggtggaagaggtcgttttcaatctcatcgcaggagagcaccacagcgtgttctttttccttgagctgccgggtgtaaaagcccttgccactgcagattttgccgcagatcaaaaatacttttgccatgctttttacattactctttgccgttccagcagtaggtgcaaaggcagtctgcgtcgatgccgacggactccatcatatcgtcgaggcgatggtagtgaagggaggtgaagtgcagcttttcgccgatcttctccaccatcttccggtacttctcgctgtccgggtcggcgtattcttcaagtgtggcgcggtcggggtcgcagccctcaagctctttaatgacgcggcgggtgatgagctccatttcggacgtggagcgggagaagtttaagtatttgcagccgaagagcagcggcgggcaggcggggcgaatgtgcacttcttttgcgccgcttgcgtagaggaactcggtcgtttcgcgcagctgtgtgccgcgcacgatggagtcatcgatgagcaggaggctcttgccctcgatgaggtcatgcaccgggatgagcttcattttggcgatgaggtcgcgcttgctctggtgcgtcggcatgaaggagcgcggccatgtgggcgtgtatttgatgaacgggcgggagaacggtacgccggactcgttggcatagccgatggcgtgcgcgatgccggaatccggtacgccggcgacaatatcggggtggacgttatcgcggcgggcgagcgcgcggccgcagttatagcgcatgctctcgacggagatgccctcgtagctggaagacgggtagccgtagtagacccacaggaacgtgcagatcttcatttttttgccgggggcgacgagcgtttgcacatggtcggcgtcgaacacgacaacttcgcccgggccaagctcgcgcaggtcgtggtagccgaggtttaaatacgcgaagctttcaaagcttgcgcagtagccgtcttccttttggccgagcacgacgggggtgcggccgagtttatcgcgtgccgcgtaaatgccgcgcggcgtcaggacgagcatactcaaagaaccgtcgacgacctcctgcgcgtagcgaataccgtcgatgaaattctctttctggtcgatgatggcggcgacgagctctgtggggttcacttcgccgttttgcatctcaaagaaatgcgtgccgcgcccgatgatgtcctctacgatctcattggcgttattgatcttgccgatggtcgtaatggcgaaggtgccgtgatgcgaacgcaccaaaatcggctgtgcttcataatcggagatgcagccgatgccgagcgtgccgtgcatagattgcgattccgttgtaaacttcgtgcggaacggagcgttttcaatgttgtgaatggccttgtcaaagccggtctccgggctgtaaaccgccatgcccgcgcggcgtgtgccgaggtgggagtggtaatcaatgccgaaaaaaaggtcgaaaacgcagtcagtctgcgatgctgcgccgaaaaaaccgcccataaaatagatcttcctttgctgaaaaattgagggggcagtaccgcggaggagttatgcggtattgtccaaaactcttttattataacaaaaatcgcgttatccgaaaagagacacaaaagagaaagaccgccgaaatttcggcagcctttttgtaaaggataacagaattttttacaagatgggctcttttgcctgaatggatcttgcgtgcagcgcaaagatctcgtggcggcggtctgtgccgaagatgtgctgcttgtcgtactcggtgctgaagccgacgatgtaaatgacgagcagaccggtttgcggccacagcatggagatatccaaaagcccgtgcagcagaacgcaaacgatgacggagaccgtgagggcgtagcgctggtggcacttgtggctgcggtgcaggcggataatcttgccgacattgacggcaaagtaaccgagtaagaccgccgtacccacaaatccgaagtccatgaggagctccaaaagcaggttgtgcgaatgctttgcgatgctgtatgagccgtagaggtcatggatgcgtgcgtatgtattgtagccgcggccgaaccacggggcgtccataatactgccgatggcgcccgaccagatgctcatgcgctttgcaaaatcgtggcggatgagatcgatgcgcgggaggaaatcgagcgattcaccgaacagaacgagtgtgagcaaaatgccaagcatggtgaaaaggtacacggaaagccacttcttcttgccacagaaccacagcatgacagggcagacgatgagcagcaccatgaaagtggtgcggcattcggtgagctcgagtgcgataagattcaacggaatcagggcagcgtataagccgcgcagcggcgtgtcttcgctttttacgatgttgtaaatgcagaagagcacgacgagcgaaatgtaaaacgcatagtaattggggtttgtaaagatggagttataccgcgcaccgtaaacccactccatgccgagcgcgcgctgaacgagcgcgacaaggaggcaataggggctcatgaggcagacgaaagacaaaatgaggcggaacgcgcgctgggtcatcgtatagctgacgaaaatgacggcgatgaatgcgaacaccataaaaacgccgagcagaatatccgttacggtgccgcctgagaaaatcgtgacgagcagggagagcacccagaaagccgaaagaaaaaataaatcctgtttacggcggaagaaaacgaagctctgcttcgtggcggcaatgtaaaacggcaataaaagcaacgccagcatctcggcatagacggtgaggaaaatggaagccgttaaaacgagcaagaccttttcgtttggggtaagctctaaaaatccctttttcagtgctctgaatacttgcagataaatgcacctcctgtggaccgcggccgtataccgtgatccggtaaaaccgtttcaaaaaattacgaaatcataaaaattcaaatcatgtgcgtacatgcgtacatgattacgctcatataaataagaaataccccggcgcggattactattttagcgcaacttttctggatttacaaggggttttgcagcttttttgcatttataaagagatttgtaagatttgattttaaaactgaacagaagatttacataaggcgcaaaactttattgaagttgcacaaggtttgtctgcacaacttgaacaatgcgctgtattgaaatgggcatgacaggcgtgctataatacgaaatataaagggtgcgcgtttgccgcccgaggtttaggaggctgctttcagatctatggatatacgagtcttgcagtattttctggctgttgtgcgtgaggagaacatcacgaaggcggcgcagcttttacatatcacacagcccacactttcccgccagctgatggggctggagcaggagcttggcgtgaagctgttcagccgcaacaaccacagcgtcacgttgacggaggaggggatgttattccgccgccgcgcagaggaaatcgtgacgctttccgaaatgacaaagcgggaattaaagcaggaggcaatgctgaccggcgaaatttccatcggcagcggcgagtaccacggctcctgccatctttccggcattctggcggcgtttcgcgccgagcacccgaacgtgacgtacagcatttatagcggcaactccgataacattaaggagcgcattgaacgcggcacgttggacatcggcttgctgttggagccggtggaaatcagcaagtatgattttctgcacttcccggtgccggaaacgtggaacgcgctggtgcggtcggattcgccgctggcgcagaagccgtatttgacgccacaggacattgtgccgtacccggcggtgttttcgcgccgggaccagatccgcagtgagattgtgaactggttcggcgacagcgcggaccggctcaacattatcgcgcacggcgatttgcaatacaacatggcttcggtcattcgccgcgaaaacggcgtgctgttcacgctgaagctcgacctgcagcataacggcctgaaattcgtgccgctgcagccgccgattcgcgccgcgacggtgctcgtttggaaaaagaaccgtgtgctctcaccgctgacgaacgcgtttctcgattttgcgaagaaatacatttccggcatggagaaggataaaaaataggtattggacattcttttgatggtttagtatactgaaagcaagaaattacgaatttttcatagaaaaggggaagacacatggaatacgtaaaactcggcaactctgacctgaatgtttcgcgcatttgccttggctgcatgggctttggcgaagcggccgcggggcagcaccgctggacgctggatgaggaaaactccaacgagattatcaaagcggcgctggagaacggcatcaacttttttgacacggcgatgagctaccaaggcggcacgagcgagatgtttgtcggccgtgtgctgcgcgattttgcccgccgcgaggatgtggtgctggcgacgaaatttgagccgcgcaccgacgaggagattgcaaacggcgtgacggggcagcagcacgtgaaaaactgcctcgatgcaagcctgaagcgtctcggtatggactatgttgatctgtacatctgccacatgtgggactatcgcacgcccattgaggagattatggaggggctgaacgacgcggtgaaggccggcaaggtccgcgccatcggcatctcgaactgctatgcgtggcagctggcgcaggcgaattactacgcccgtatgcacggcatggcggagtttgtgtccgttcaagggcattataatctcattttccgcgaggaggagcgcgaaatggcgccgttctgcaaggcggagaacattgcgatgacgccatacagtgcactcgccgcagggcggctctcgaggcatcctggtgagagctccaagcgccttgaggaagacaactacgcgaaatttaagtacgacaagaccgccgagaccgacggtgtgatcattgaccgtgtggcggagctggccgaaaagcgcggctgcaccatgacggagatcgccctcgcgtggctgctgacgaaggttgcgtcgcccatctgcggcgcaacgaatctttcgcacatcacggggcttgtgaacgccgttgaattgaggctcaccactgacgagattgcataccttgaagagccctacgtgccgcatgccttggtcggcgtgatggcgcagaaccatgggtgatttggagacgccgtgtatttcactgcccgcagggcaatttcacataccgaagggatttatttcgttgaaaaaaggactttgcaaaatgcaaagtccttttttctggtggaggagggtggattcgaaccaccgaagctagaagcagcagatttacagtctgtcccctttggccactcgggaactcctccatatacagagttgcgtaaacgcaaactcatattataaaaacgggaaacccgtttgttgcaaggcgaacacactgctcgcttgagacaatcgttattataatacatcggtgtgcaaaagtcaaccctgtttttgcgaaaatttgtgttttttcgcgggggaaagactttgcggttctggtttggcttgacatcatcgctttggggcggtatactgtatttattgcggcaggaagctgcgagggcgttgaagcgccggatcttgtttttataggattaaattgtgccagcggaggcgcgcggactgtatggggttcgtgcgcctttttgattttaggaggaatttgcatgaagactttgtattttgactgcggcatgggtgcggcgggcgacatgctttcggcggcgcttttagaactgtttgacgacaaacaggcagtgctcgacgagctgaacgcgctcggtatccccggtgtggaatttaaggcggaagtgagcacgaaatgcggcatcaacggcacgcatctttccgttacggtgaacggcgaggaggaagaaagcgctgacgtgcacgaccacgaacatcacgctcacgaccatgtacacgaacatgagcatcaccacgaccacgatcacgaacatacgcatgagcatgaacacgaccacgggcatcaccaccacagcagcatggcggatatcgagcatatcatcgggcatctgccgttggagaatgcggtgcgtgcagacgtgattgcggtgtataagctcattgcggaggcggagagccatgcgcacggcatgccggtttcggagatccactttcatgaagtcggcacaatggacgcggtggcggacattacggcggcgtgcttgctcatccgcaagcttgcaccggagaagattgttgcgtcaccggtgcatgtaggcgcgggaaaggtgcgctgtgcacacggtgtgctgcctgttccggccccggccacggcgtatattctgcgcgacgtgccgatctacggcgggcgcattcagggtgagctctgcacgccgacgggcgcggctttgctgaagcactttgcggcagcgttcggcgatatgccggttatgcgcgtgcagcgcgtgggttacggcatgggcaagaaggactttgaagtggcaaactgtgtgcgcgcgatgctgggcgaaaccggcgacggcgcggactccgtttacgagctgaactgcaacatcgacgatatgaccgccgagacgattggctttgcggcggagaagattcgcgaggcgggcgcggtggaggtcttcacgaccgccgttatgatgaaaaaaaaccgccccggcacgctgctgacggtgctgtgccgcgaggcgcagaaggaggccgttgtgcaggcgatttttaaacacacggcgaccatcggcatccgcgagacgctgtgccgccgctatgtgctgacccgcacggaggagacggtggagaccgccctcggcccggtgcgccgcaagttgtcttccggctacggcgtgcagcgcgcgaagtttgagcacgatgacctggcggcgctcgccgagaaaaacgggttgagcctcacggaagtgatggaaaagattggtagataaaatataaaggtttatgggcctcgcgttttgcggggctctttttctgtgtgcggaaaaacttgcaaaagtattgcaaaggaactgcaaaaactgtacggtttatattgaaacagcggggcgggtgtggtatgctctgggcgtagaaaggttacacaaaaccgaaaggagcattggttatgaaacggacgttaaggacgaaaatctggtgtgctgtgttggcagttgcgtgcatcagcggcgtggcctttggcgttgcaaatttgccgcgtgtgcaggcggaggcggtctccggcggcgtggaggtcacggaggcaccggggaatgaagcagtagtttcggaagaaagcaaagcggaggtgccggagatctctggaaatcccgaaatctccgaagtatctgaaacggcggaggtatcttctgcgaaagaagaatttgaatcgcattttacagcggatgaaaaactggatttttccaagataccgaaaatcgttcgcacggaagacgggagcatttcaattgaaaacggcgacggcagttttgatgcagagaatgacccgtacttttctgcatcgagcatttacggcggtaaaaatgtgaaagtcacgatcaaagacgtgcatatgtccaataaacttgaatatggccttacgccggcggataacgactgctttgttccgtggtggataaatggtggttacccgtggctggagacctgcgagctgaacgaagacggcacgctttcttcgccgcattatgcgtttgcgtatgtcacaatcggctttgagaacaccggagatgaagcgacgggattcctttccggggcatacgccatgggacagtatgacacagacggctgccctttggatatgtccgagtgcacgaccgacaagcgagagctgatcaacggcattgcagaagttccgatgaatgcggaagacccgaacaagaccgggaatattctgttggagccgggtcagacaagagagcttgtcttcatatatcttttgtctgacgagagcgtctatgtgcgcacagatgatgaagccgctgaaagagacggtgtgaaaaattacattgagatcgtagaaaactactttatcgacgcctatacggaaaccgattgccgatatacaatcgatgtcaacagcggtttgggcccgtttgtgcactatgacgtgagcgacattgtgaatgatttctttacggagcacaaataatattgcaaattggagccggatgaaaaactaagaaagactaattattaaaagtccaaaatgaaaaaattcttcaaccgtttgtgcagtacaagctgattccacccagaacgccctggcacaacggcaaggtagagcggagtcgtcgaaacgaccagcgctatttttacaactgggaaaagtttgcaagtgtagaagatctaaaccgaaagctcaaagatcatttgcgctggagcaacagaaagctcatgcgcacgttgggcggcaaaagccctcttgatctcctccgtgaaattctttctaacgcctgattcttttctatccctcttttctttaccttctgtgggtcatatctatttacaacgcagagtagataaatgcagaaaatgctagatgtattgacttttggatttatatcgactatactatgttagaggattaaaggatgatttaaatccttgtttttaagcgaaaatgttcacgaatattaaaaatggagattatatgaacacgcagaaaaatgatattttgaaaactatttttttgaattcgtttactaatcaacgaatcttagcagaagaatctgggcattcactgggggttgtaaatcgttcgataagagaacttatgcaagacggatatatagataagtcaatccgcccaaccaacaaggcggtagaggagtttaaacaaaaggcaccaaaacgcgcgattattttggctgcaggttttggaatgcggatggttcctattaatacagaaataccgaaaggactgttagaggttaatagggaacctttgattgaacgtattatcaaacagcttcatgaagtagcaatcaaggaaatttatatagttgtaggctttatgaaggaaaagtatgaatatctgattgatgagtatggcgtagaactcgtagttaatgccgattatgcttcaaagaataatttgcattcggtcaaacttataaaagaacatctggaaaatgcttacattattccttgtgatatttggtgcgatcaaaatccttttcatcgatatgagttgtattcttggtatatggtcagtgatctcatagataatgagagtaacgttcgcgtcaaccgtaagatggagcttgtaactgtgccggagagttcaggtggtaatgcaatgattggaatctgctatcttgtgaaggaagatgcagatgttgtcgcaaagcgcattgatgaactttgtgaaaaccactggtatgatggagcattttgggaagaagcgctttataataatgataggatgattgtgaccgcttatgtggtgcattcatcagatgtcgttgaaatcaatacttacgaacaacttcgagaaattgatagccattctagccaattgaagacagatgctattcaagtgatttgcacagcgcttgaagcaaaagaagaagaaattacggacataactgttttaaaaaaaggcatgacgaaccgatcgtttctgtttacatgtaaaggtaagaaatatatcatgcgtattcctggagaaggaactgatcaattaatcaatcgtcgacaggaagctgcagtttaccaagcgcttgatagaaagcatatctgcgatgatattgcatatatcaacccggaaaatggctataaaatcacagagtttttggaaggagccagagtatgtgatccatcgaattacgaagatgtcaagaaatgtatgaaacgactacgtgcatttcatgacttgaaactgaaagtaaatcatgagtttgatattttcggacagatggagttttatgaaacgctatgggaggggactccttctgtttataaggactatgaaaaaacaaaagcaaatgttctgtcgctaaagccttatattaatgcacatgctggagaaaaagttttgacccatattgatgcagtgccggataattttctgtttgttgaaaaagatggtaaggagggcattcgtctgattgattgggagtatgcaggaatgcaagaccctcatgtggacgtggcgatgttctgtatttattctctttacaataaacgtcaggtagatcggttgattgcagcctactttactgaaggctgtagtgatgagaccagaatcaagatttattgctatattgctgcttgtggtctgctgtggagtaactggtgtgagtataagagaaacctcggcgtagaatttggcgagtattctcttcgtcagtatcgatacgcaaaagactactatcgaattgttcaagaagaattgaaaaagcaaggggaggaaaagtaaatgccaagagtagaaagagccattattatggcggcaggtttagggaatcgaatgcacccggtgacgctgacaataccgaaaccgctggttaaagtgaatggggttcggatgattgacacagtcattgatggtctgcataaaaacggaatcaatgagatttatgttgttgttggatatctgaaagagcagtttgtgacgcttgaaaaggagtatcctggtgttaagctgattgaaaatccttactatgatacctgcaataacattgcatcgctttacgtggcaagagattacattgaaaatgcgattattctggatggtgatcagattatttataatccggaaattcttgcaccagagtttgaacgctctggttataacagtgtttggacagatggagaaacggatgagtggcttcagactgttgagaatggcattgttacagcatgcagtcggacaggtggaaaaggcggatggcagctgtacagtatttcccgctggacggcagaggatgggaaaaaactgaaacaccatctcgaaattgagtttgaacaaaagaagaatcgacaaatctactgggatgatgtggcgatgttctgctacccagaggagtatcaattgggtatccgtcctatgaataaggacgatattatagaagtggataatctgagcgagctaattgctctggataccagttacaaaaaatatatggagggaaagtaagtgaatgcaaaaaaagaacgtggaaaaatagactggatgataacattggtgccactggcaattgtaattgcattatgtgtactattcttttttgtaccggaacaatcgaatgccgtactgagccagatccgttttttctttggtgatacctttggtacatattatttggtaattggattgggaatttttatcctttctctgtatattgccggttctaagtacggtaacatcgtccttggtgagcagaatgagaagccgaagtattccttctttgcatggggctcgatgatgttcacctgtggtctcgcagcagatattttgttctattcgttctcggaatgggttctgtatgcaactgatccacatctggctgagatgggtagtattcaggattgggcaggcgtatatccactgttccattggagctttattccgtggggattttatctggtactggccgttgcctttggctttatgcttcatgtgagaaaaagaaatcgtcagaaatattcagaggcttgccgtccgattcttggaaaacataccgatggatgggcaggtcgcattattgacctgttagctgtgtttgcacttcttgctggtactgccaccacatttagcgtggcaacaccgctgatggcaaccattatcagtgagttgttccatgttgccgttagtcgtactgtgatcaacattattattctcctgattacctgcgctgtatatacatactccttactgcatggatttaagggaatcagcaagttggcaaacatttgtatttatatgttctttggcctgattgcctttgtgctgctgtttggtggagaaacacggtacattattgaaactggtttttcttcccttggacggatgattcaggactttgttgatctgtctacattcactgatccgctccgtacatcgaatttcccacagaactggacgatttattattgggcatattggatggtctggtgcgtggctgctcctttctttatcggcagtatttctcgtggcagaacagttcgtcagacaatccttggtggctatgtatttggtgttggctctacgttgacaagttttatcgtacttgggaactattctatgggaatgcaggtcactggaaaggctgactttattgcacagtatctggaaagcggagatctgtatggaatgatcgtatctattattaagacgatgccgggcgcgcctgttatcatggtagttgttctgttgacgatgattgctttttatgcaacatcttttgattctattgcattgacagcgtcttgttatagctatcatgcactaaatgatggagagcagcctaataagagtattcagttaatgtggtgcattctgctgatccttctaccgatcgcgttgctgtttgcagaaagctccatgaataatcttcagtcggttagtattgtggcggcgttcccgataggagttgtcattgtgatgattgcagcgagtttcataaaagatgcaaaattgtatatgaaagagttaaaagcagacgataagaagaggtagaatagcaacaaagagaataggaccttttgctgtaagtttaatttacaacaagaggtcctatttttagctgtaggagagtcgtatttagctaacccacacgccggaatcgtcaaacgagtaatttgtgccaccgatatttacagtttcgtttgaagccatatgaccgtcgttgtagaggtaataccaaacaccgccgatgaattgccagccagtctgcatggcaccagatgagttgaagaaataccaaataccgccaatggattgccaaccagtctgcatggcaccagatgagttgaagaaataccaaataccgccaataggttgccaaccagtctgcatggcaccagatgagttgaaaaaataccaaacactacctatggatttccatccgtaggctttggtactgttttcgtagaagtaccagtttccgttttcgttttcccaaccattcttttgaatttcagttatccatcgtcctgaagcgtcaaaagcataacgtgtaccgccgatattcaaagtatcattggacaccatatggccattatcatagaaataataccagtctccgttaatttgcttccaaccaacctgcatattaccggaagggtcaaagaaataccaatcacctgtaatccattgccatccggtttgcatgatgccagaggcatcaaaataataccagactccaccaatcattttccaatcggtaaccgctgttccgttttcgtaataataccattcactattcttttgctcccagccggatttagatggatcagaaacattgtagtgaataattgctttatctagtggatttggccaaacggattctttgattatgacattactccaattttctttgctagaggcataatatacatctgtgaaactactgcagcctaaaaacgtatcgctatcgatttcatgcagactttttggtaaaacaatacttgttaagcttgtgcagttacgaaaagacgaggagccaattatctcaactccctctggaattgtaatagtttgcagaactatgcacccattaaacgcatcattttcaattttcaatacaccttcttgaatagtgaccatactgagcgcagcgcaaccactaaatgcgctagctggaatgttggttaaagttccagaaatatttatttgggtgacagatgaacaattgcaaaatgcagcaggcccaagtgtagttagtgtatcgggtaaaatgatggatgccaatttcttgcaactactaaaagcactgtcttcaattgtttttaatccatttggaaaagtaacattctctaacctctcgcagttgtagaaggcgtatttgctgattgttgtgatggtagatggcagagagcaatcagttaatcgattacaatcactaaaagcaaaactctcaattacttctaagccgtcattcaaaacaactgaagctaacgaagaacagtggtagaagcaggatgaaggtatttttgagatacgatttggaatggttatactttttaatgatgtacagttttcaaatatcgatctccccatcatgattattgtatctggcaaatctactgatgctaatgaagaacatccataaaaagcataagatctaatctcaatcaagcttttattaaacacaagtgagtttaacttactgcagttataaaatgcggaagacccgaacaagaccgggaatattctgttggagccgggtcagacaagagagcttgtcttcatatatcttttgtctgacgagagcgtctatgtgcgcacagatgatgaagccgctgaaagagacggtgtgaaaaattacattgagatcgtagaaaactactttatcgacgcctatacggaaaccgattgccgatatacaatcgatgtcaacagcggtttgggcccgtttgtgcactatgacgtgagcgacattgtgaatgatttctttacggagcacaaataattttgatgggaaggcccggcttttgccgggctgtttccttaagtttctgcagttttgcggagaaaaaggaaattttcaaattttttcattttagagttgacagaacggcgcgaaattgctataatattaaagctgtatgactcattagctcagttggcagagcacttgacttttaatcaaggtgtccggagttcgaatctccgatgggtcaccaagcgcgttttacgcgctatgcgctggtgtagctcagttggtagagcagctgatttgtaatcagcaggtcaggggttcgagtccgttcaccagctccagttgattaaaactgagaacattttgttttcgttttctatatatttattgagttcggcacggactcgaaccctgagagggtttcggcgttaaggaaactttccggtggaaagtttttagccggaagcggcgcaacagctatgctgcaagccgtgaagacgcgcaagcggcttcgtccgttcaccagctccagttgattaaaattgagaacattttgttttcgtttttatatattgtttccgagtgttttgcttggcagcaataaacagaacttgtttctgtttttataatatgagtttgcgtttacgcagctctgtatatggaggagttcccgagtggccaaaggggacagactgtaaatctgctgcttctagcttcggtggttcgaatccaccctcctccaccagattatgtgcctgattttactgtcaggcacatttttcttagtattcatgcgggtttgcgggcttttttccgtttcaaaaaaggattggtgtcccattactgtcatccccgtttttagagatatctgcaaagctaagcggagttttcacctgatttttcaggctgggaactccgcttttttgcgtttaccactcttttttcccgttgtcggaactgtaaaagttttcggcagatatatagatagattgacgaaagccccaaatgggccaatttcaagccctcaagatacaagggggtagtgcgcccttttttagaaccgctccggctgaatggccggggcggttttccgcttttcccccctctcacactctcccccctaatactttaccagctgggaaagaacaagataactctaagctctaactcagcaagaacctcaagttttcaacaaccaacaagaaaggatgagtaaaaccatgaacattggcatcgaccatggctattacgcaatcaaaacccggcatttttctttcccagccggtattgcagagtattcccatgaaccctacaccttgcaaaacacactggaattcggcgggaagttttatgtctgcggaaccggcagacagccgatcctgcgtaacaaaatggaaaacgacaattactacctgcttactcttgcagccatcgccaaggaaatcaaacagcgaggtggaaaaacggagtgttcggtgcgcattgccgccgggctgcctttggccggatttggccgggagaaaaagcccttccgagaataccttctgcgttcttcccagccggtgtgcttcaagtttgaaggaattgcctacaaaatcaccatcgaggatgtgaaactgttcccacaaggctattccgccattgctctgcattcggaactcatccagaatgagccttctgttcttctcatggacatcggcggctggactgttgatctgatgcggctggataatggtgttcccaatgcggctacctgccgaagtctggaactcggtatgatccgctgcattgatgaaacgaaagaacaggtccgccgggataccgggctgtctgtgaccgacgctcaggtggagcgtgttctgacaggaaagccctgcagtatggatgaggacgcccgaaacattatccagaaacaagggcggctttacaaagagagccttctttcggcagctatggaatcagggtttgacctgaaagccatcccggtggtgatgctgggcggcggcgcatcggtagtcaagggcaacgtgagcgaacaggacagcctgtgtcgggtttttgccctgatagacgacaaggtaaacgctgaagggttcgagaggattttggggcagttttcgggcggtgtgggcaaggcatgagcaggcccctatttatgttccgccccaacctccagaatgaagaacatcgcagagcatgggaaattctgcagactgtgccggaaggccagaaaaacgcctttctggtacaggtgattctggaaaatgcccagcgagaagaactggaaacaattctgcgccgggtactgcgggaagaactcaaagctgtgccttcccagcccataccacagcaggaagaagccattccgaaggagatgatgggcttccttggttccctgttgagagaagaataacccccacatagcctttattggttgtgacgtttgtcgagcctgctttgactgaaaggttgttggtcttggtaatagctttatccggcgggttgcagtatgcttgtgttgcccgaaagggaaagaacgaaaaaaggagcgataggcgtggaaacaaagggcgtaacctgcaaaatcccgctggatctgcataaccaaatcagcgaggaaatcagggaaacggaaagtacgatgagcaaattcatcgaaatgatcatccgggagcattatgagaaaggggctaacagaattatggaaaaaggaagaacattagcatttcaggtgagcgaggaattgttccagagggtaaaggaataccttgaaaactatgagaaagcctatcatcgccgcctcacccaaaaagaattcgtgattgggctgatcgaacaggcgctggaagaagcggaagaagaattcgaagccgccagagcagccgagcacgaggaacaggctgaaaacggctgggaagccgcagaaatcgctgaaagcgatgaggacgaggaagtatccgatgacgaggaaccagaggactgggacgaagaaaatggcgaaaccgagggactcagtgctgatgaagaaacaaccgggagcagctgggaacctgcagaaaacaccgaaaccggtgagggcgaggaagaacccagcgaggacgatgaggatactacaccggaaagctggaatcaggatgaggaagaagaaaccgagccggatgacgataccatagaatccggcgaaaccaatgaaaatgaagatgaaacctacgcataacacagccagcagcagcccgcaggaaactgcgggctgttttcatatatatttcatttcaccatgggaaaggggcgatgtccattgattgtgtgttagcttttagtatcatacaagataaggggcgtgatatagaaaaccatacgatatattgacctgttctccggtattggcgggttccgggaaggactcacccgtgccggaggatttacctgtgtaggacactgcgaaatcgacaaaaaagccaatcaaagctatgaagccttgttcgataccaaaggagagtggttctgtgaagatatccgaaaagccgatccgagcgatatccccgacttcgaactcctgtgcggaggttttccctgtcagtctttttcgattgctggaaaccgtgggggattttccgatccaagaggtaccttgttctttgaaattgcccggctgactgcggcaaaaagacctgcgtatctgctgcttgaaaatgttcccggactgcttaatcatgacgggggcaggacatttgcggccatcctccatacgctggacagactggggtatggtttggaatggcaggtgctcaacagcaaagattttggagtcccccaatccagaaaaagggtgtatcttatcggatatcttgatgaacgatgcagaggaaaaatatttcctttcaccgaaacagcaggaatatctcttgtacaaatcctgcccggagctcagggagaaagaatctattccacaaaaggaataagctgtacccttgctgcacaaacgggtggatttggcgggaaaaccggactgtatgaagttgggcttccgattaaggaaaacacgaaaaaaggctataaaatggcgtatcccggcgacagcatcagtttggcgtttgccggactgaatacccgccgcggcagagttggcagaaaaatcgcccataccctcaccacaaacagcgaccaaggaaccttggaagcccgtgcggtccttaccccggaaagggaaactgtccgtcagaacgggcggcgaatcaaatctgcggaagaacccatgttcaccctcaccgcccaagaccgccacggtgtttttttcggcggccgaatccgcaggctgactccaaaagaatgcctgcggctgcaaggctggcgggacgaacagatcgacagagtgcttcctattcaatcggacgcacagctctacaaacaggccggaaacggcgttaccgttacagtggtggaagccatcggcaaacggttggcttctgcccatcgggaggtgaatgccatcgattgatctgaaagaccaatatttcggctgtgaaattgagatgacgggactcacccgccagcaggcagcagaagccgtggcttccctgtttggaaccaacgctgtccattcccgttcttcccgcacctatgatccgtgggaagtgaccgataacgagggaaaaacatggcggtttgtttacgactccagtatccatggttctcatcgaaccgggcggcagcaggttccaatcggtgatggtgactacaaggtggagatgaattccccaaaactggagtacagcgaaatgggaaaactgcaggaagttgtccgtaccctgcgccatgcaggagctgttgtcaatggaagctgcggtatgcacgttcatgtggacgcttccaagcatacaccgcagagcctgaaaaacgccctttccattatgtattccaaagaggatatcctgttcaaagccttaaatgtaaacgagagccgggtggaacgctggtgccagaaggtgcgggaacccatgctggagaaaatccgtaaacttccaagcaatactaccatggatcggttaaggcgggaatggtatgaaggctctgacggaagctacgagcattacaactggacaagatactatgccttaaaccttcattctgtgttttaccgtggaaccttggaatggcgctgttttgaaagcaccctccatgcaggcaaagtcagggcaaacatcacgctggcactggcgatctctgcacaggctattaaccagagccggacagtcatgcggaaaaccgagatcagcgaaaaccctgcctttaccttccgcacctttctgctgcgccttggtcttattggaccggaatacaaaaatgtgcgagaacatctgctttcaaagcttcccggcgacagggcatggcgctacgataaagctcaataccccagcctgcagaaccgccaaaaccatgaacgataggagatgatcaaaaccaaagaaaaactttattttgcgtatggttctaatatgaacctgaatcagatggcgtttcgctgtccggatgcagaagttgtggaatccgtccggttagagggataccgccttgcgttccgcaccaatggcggcgggaatggcgttgccaccattctgccggaagaaggaagctatgtggacggcgtcctttggcgtatttccgaacgggacgaacagcatctggatcattacgaaggatttccctttttatatgggaaagagcctgttacagtgacaaatcaggacggagtcagacgggaaatcatggcctatactatgaacagcccgtataaagacaaacccgccatgccctctgtttcctatttggaaggtattctgaatggatgcagacaaaatgggatcgatacccaaactgtaatcgaagcggttcgctgtacacagcaggaactgcctcagaaggtagtccctcacaaaaaacagcgccatcccaaacacaaagaagaacgataaattgacttgcccccgtaagttgagagttttctttcagcctgcgggggcattttttattttatccgaaaggagaacttcatgaaaaaatatctaaaaagacttctgtctatgatgatggcagtgcttctttgctttggtattgtaccaagcaatgcttttgccgctgaatacgagtatgatggatatatctccatgatcgactataacggcagaggatattctcttagctccagccttccggcgccatttggcggatacagcacagataagtttactgaactgcgaattaacgatttaacagctttccgcaccgcctattgcatccagcttggcgtggcaacccataccgggattggctatgaccagtcggatgattatgccgcccttaccacggaacagaaagcaatgatcaacactgctctgaccttgggatataacgtggaaaccggcactaagtacggcgggagcgccatggatgaatacattgccacccaaatcctcatttggctgattgcccacgggcagcttggcaccggatatgaaaaccagatcgtgaatgaaattactgccaacagccctgcggcaaagacgatctttcagaagctgagggaaaacgtggttacttatcacaccgttccatcctttgccaccgacaatcccagtgcggtcggcgcatatacacatgacctcaaatacaatgaggacactggaaaaaatgaaaccacactggtggatgaaaacaatgttctcaaagatttctccgtcagctatccgggagtggatttttccatcagcgggaacaaacttcatgtttctacggataaaaaggaattcggtacaatcaccgcagaaaaggagctgccttcctctatccccggtgttgtaacaggcggcaccaaatactggctgcgtgatgaataccagaatgtagtcacttttgacgtcaaaggctccgctgaacccgtaaagtgctatttttcccttgagatcaaggcgggtaccctgcagcttgtgaaaacctccgaagatggcgaggtttccggcattccttttcatatttccgggaatggaatcgaaaaagacgtggtgaccggaccggacggaagcatccgggtagacaatctccaagctggaacatacaccgtaacggaacgtgccccggacaaatatgtccagcctgaatccaagcaggtaaccatctatcccggccagacttccagcgtgagtttttccaatcttctgaagaaatttacagttaaattggataaagtggattccgaaaccgaggaagcacaaggcgattccagtttggatggcgctttatacggtatgttcaaaggggaaaatctgctggatacctataccacagcaaacgggggcaaattcaccaccaaggaatacccctgcggatcggattatacaattcgtgagattacgcccagcgaaggatacctgctggacgaaaccatctatccggtaggtgcagaaccgggaaatttcaccttggaaaacaacagcatccccatgaccgctacagaggatgttatcctcggcagcattgctatcaccaagcatacggacaaacctgctgagagcagcgattccgatcagatcgagcagccagaagaaggcgctcagttccagatttatctggccagcgcaggcagctatgagaacgcaaaagaaaccgagcgtgacctgctgaccaccgattcctatggatttgcccgttcaaaggaccttccgtatggcttgtatgtggtgcatcagaccaaaggtgcccaaggacagaaatttgtcccagacttctccgtgttcatttctgagcacggtaaaacctattatttcattctcaataaccccacctttacctcgctcatccgctttgagaagaaagacgccgaatccggcaaaattattcctctggcgggaacagcagtcaaaatccgcaacgctgataccggcgagtgggtagtacagcatatcaattaccccagccccatcgatatcgacacctttgtgacggactccacaggaacccttatgctgccggaaccgcttccgtttggaaattacgagctgtatgaacagcagagtccatggggatatgttcttgacaaagagccggttccctttgtggtggacggtttacaggacgtggttacagtggagaaatacaatatcccgcaaaagggaacgattacagtctccaaagagggcgaagtatttaagtctgttgcagaatccggcgggatgtaccagcctcagtatgaggtgcagggccagccgggcgctgtttatgaaatcacagcactggaagatgtcgttaccccggacggaaccgtccacctgaaagcaggcgaactggcggctactttgaccaccggaagtgacgggaccgccacctcggaacctttgtatctcggccgctatcaggtgaaggaaatcactgcgccggatggcatggtaatcgatcctgaacccaaggaagtcgttttgtcctatgccggtcaggaagtagagatcacctccgccagcattggtttcgtcaatgaacgccagaaagtggagatttccctcaagaagttgctggaacaggacgaaaccttctccctcggcatgaatgaggaatggaaaaacattactttcggactgttcgctgcggaacaactgaccgcctccgatggtacctccatcccggcagacgggctgatggaaacaatcggcattgacgagaatgggaatgccgtatttacaaccgacatcccctgcggggcttccctgtatgtacaggaaatcggaaccgacgatcactacattttgagcgacaaaaaatcccctgtggtgtttgagtatgccggacaggatgtggcgaaagtggaaattgaagcgaacgatggagaagccattgaaaataccttaaagcgcggcaaggtatccggctggaaggtcgatcaggatggttttgaattaggcggcgctgttatcggcctgttccgttttgacgaaacggagtttaccgaagaaaccgccctcatggtcaccgagagcaatgaaatcgggtactttgagtttgataatgtgcctgctggaaacttcctcgtgcgtgaaatcgcatctccggaagccttcgtattgacggaagaaatcttcccggtagaaatcaccgaggacggacagaccatcgaaatcaccattgaaaaccagatcatcaaaggtaccgccgaaaccataaaggtggacgccgattatccggaccacaagctgtccggggctgtttttgaagtttatgccgatgtggacaataatggtgaattcaatgcggatatcgacaagctggcaggtgaaatgacagaaaccgaaccgggcctctaccagatgaaggatcttgtttatagaaattacttcctgcatgagaaggaagcgccggaatttttcgaaaaggatgacggatattatcctttctccattactgagaatgaagcgattgtccgcatcgaaaccgaagctggcgaagggttcctgaacaaagcgcagaccggttccctaaaggtggtaaagaccgccgacgatgataaggtcgaagggcgcaccttcaaaatcagcggtactgacttcatgggcaatgcctatgagcaggaattcaaaacggatgaaaacggtgaaatcaatctcactctccgtgtgggagaatacaccgtatctgaagtagctggcgaagattccgaaaagtatattctgcctgacgatcagaccgtagaaatcaaggcaggcgaaacaacgaccgtaaagatgcataacaagctggtgccggaggttccctctgttccgcagaccggcgataacccgtggatgcctgccatccttggcactcttgcaggcttggcagttttgtccggcggcgctctgcttttcctgcgctatacaggtaaaaagcgcaaatctgctgatcaggccgatgaggatcaaggcacagaagaatgaaaatctttctaaaaggattttgcatcggccttttgtgcctgagcctattgggacttctctggtttttggttctacagccggggctgaccaatggagaagcacaagccctgaaaaaagaatacgcacagcctctccccggagccgaaagctccggggttttaccggctgggaaagaacagctcgaaccggaatcccttgtggaccttcccgctttgcagactgaatacccggacatcaaaggctggatttccattcccggcacctgtgtggattacccggttttgcaaagcagcgctgacgatcccgaatactatctgcggcgtacctacaagggagaatggcgcactgccggaagcatcttttttcaatgggattgttccgcagagagtcaaaataccgtggtctacgggcacaacatgaatgacgggaccatgttcgctgttcttcaaaagatgactgatgaagccttccgcaacgaacactccaaaatcctgctgcagaccagcaatggactgcgggaatatcaaattgcggctgtgctgaaaaccgatatcacaaagttccggtttaaccgcactgaatttgcggatcatgcggatttcctgtcttttcagaaagagctcttcgcacagtcattatacgaatcccaaaccatccacggcgaggactgccgcctgctgacgctcgtcacctgttcctatgaatgggaaaacgcccgcacggtggtcatcgccgcagaagtgaggtgagaatcaatcaatggaaccaaaagcaattattttgatctgtttatgcgctgtcattttgggcggccttgtgttcctgcatattcgtaaccgcaggaaaaaatagcgtaagaaccaatcggacggggcgctgcggagcgctccgtccctatttttatcatactggagggattgattgaaaaaacttggacttttggatgtggtagccgaacagcaccgcacctttatctccaacctgcgtctgctgccggaactcaaatgggcggcgcttggcgatctgtaccgcctgccggacaaggaaagataccctttaaaggaatgggaagaagcggtgtcttatctgttgggctgcgaggtgcattttgaaaactatgaagcaatcgggaaaagcctcaagcccttttccctgcaagtgaggtgatctgccggaatgtgagtattgcttgtagaaccgggcaaagcagcccggcctgttgagatgaaaaacgaccttcatgaaatgcagcaaatggtaggcggacccattcaggcactttatccgtgggaagaaccggttgctattgtctgcaatgacgaaggaaaaaatatggggctgccgctaaaccgtgtgctggagaactatgacataattgcgggagctttttttgtctgtggtattcagggagaaaacttctccagcctgactgaaaaacaaatgcagaagtatcagcagatgtttttaagccctgagaaattcatccaaacaccggaagggcttttgtgtatccgaataaacccggtggtaagcccaaaacccaaaaccaaaaagcccccgaatcatgaaagataaaggagaatgccatgaatcaattttataccgccgaatctgttacggaagggcatccggataagctgtgcgacctcattgccgacagtgtgctggacgaatgcctttcccatgacgccctctcccgtgtggcctgcgaagtgatggctaccagagggcagatcattgtcgccggggagattaccagcctgtatgaaccttctatcccttcgattgtccgttcggttctcagaaaagtaggctacaatccggcccgttttgccatccagtgcctcatccataagcaaagcccggatatcgccgcaggtgtggactgttcgttagagcagcgaagaaatgtggatgggagcagtccctctctgcagctcggcgctggcgatcagggaatcatggtgggatatgcctgttcggaaaccccgcaaatgcttcctctgccggttgtgctggcacaccgtctgaccagcgctctcaccatcgcccgaaaatccggtgcaattcaaggactaaggccggacgggaaagcacaggtcaccgtggaatatgatgaggatggaaaaccattccggctggataccgttgtgctgtctgcccagcacagccctgaaatccctgccgatgaactctgcttcgaactgacggataaagtgattgcccctgctttgcaggtcctgccaccggatgaggatacaaaaattttaatcaatccagccggaaggtttgtgctgggcggcccggaagcagataccggtctcaccggacgaaaactcatggtggacagcttcggagtgttcgcgcctcacggcggcggtgctttttccggtaaggacgccaccaaagtggatcgctccggcgcatacatggcccgatatattgctaaaaaccttgtggcggcgggtttgtgcgaacggtgtcaggttacactggcttatgctattggggcagcccaaccggtgatggtggaagtagatacctttaaaaccggaacggtctgcgccgatgactgtctggcagatgcggtaaaactggtgtttgggttaacgcctgccgagattatcgcaaagctggatctgttatcaccgagatatactgggaccgccgcctatggacatttcggcaggccggagttcccgtgggaacgcaccgatcaggcgaaaatcctgcgggcggctgtcatttaagtaagaaagggggattcccatgcccggagtcaccgaagaacaaatcaccgctgccaaacagatgagcgccattgagtttttgcggcgttaccgtcccggacaactggtgaaagccgaaagccggggtgagttccagctgaaagaacatgacagctttaaaatcaacgaaaccacaagcctttggcattggaaaagccgggatgtcggcggcaaaagcgcccttgactatcttattaaggttgaggggctgaaatttgtagaagcggtgcagaccttatgcggggaaaaccccagctatgttccgcctgtttcccagccggaacagccgaaggaatttcttttgccgccggcagcggaaaataaccgcagggtgtttgcctatcttttgaagcgtggtatcgaccgcaaggtcatcgaagcctgcatccgggcaggaatcctctacgaaagcgccgactaccacaacgctgtgtttgttgggaaggacgaaaccggtactgcccggtatgcttttctgcgtggtacctatacacggggaaacccattcaaggcagaggtgtccggcagcgataagcggttttgtttttgtctcccgccgaaaagggaaagcaaaaaactcgccatatatgaagccgcaatagagccactcgcacatttaacgctggaagggacaacagataaatggcggctgtcccttggcgggatttatgcgcctgaagaaggaacacagacaagccgggatatgaaaaaacccattgcgctggacgcttttctcgcccgtcacccggagattgaagaaatcgaaatctgtaccaataacgattttgcgggaaggtgggcagccgatcatattgagaaagcctatcagggcaagtaccgcatggtcaggaatcttccggaaaaagaaggctgcgattatgccgacctgacaaaagaaagatacgaaaaacaggctgtccggcaaagggcagcctgttcccgttaaaaggaggttttgcaatagcggataaagaaattacactcaaactttactctccattgacaggagatttccacgaaaatgaaatagacgagtatggctggaacaatggagtatccgattatcccacgctgtttgatggtacggatatggtctgctatgaggaaagcatccgccctgctgtagaacagtataccggaaacctcatgtcttacttttataaacaacgcaatcccggaattaaagaaaaggtaatcagcgcgattccttcgatagaaattcggaacggagaattgatgggctgtacaactgtcgtgctgaaagaaccgttggctgacgaagaaatggaagatttgcaggattatctgcatggacagttttccgatggctggggcgaaggctttgagcagcaggaaatccagactgacgatggtgtgctgtatgttcattttggagaagcagaaccattttattttgaagtagagcagatgcagcctgcagaacccctgaaagagcagttaccccctcatcggccaaaaatgaaattggtgggacaggacggaaacatcttttccatcctcggcagagcttcccggctgctgaaggaaaacggacagccggatcaggcaaaggagatgtgtgaccgtgtctaccagtccgggaattattacaaagcgcttaatatcattagcgaatatgtggaaacggaattatcggagaaaactcatacgaagtcgaaaaacgaaaaggaacgaggtgacgccagatgaatcagaaatacgagattaccgacattgttcacccgcagtacccatggctgcaccgtattcgggccttgcgggatgttcgtgaggatgtccatgcgggagatcttggcggtttcgtccagtctgaggaaaatctcagtcaggaagggcagtgctgggttgcgaacaatgctgtcgccgccgaggaatcctatatatccggtgacgccatcatgtgggattactcctgcgctcgtggttgtgcagtcatttccggaaaaagccgaatcggtggagaagccatcatagaagatcatgctatcgtaacctctggttatgtccatggaaacgtccatatatctggaaatgccaaaatctttgcgaatgctgttaccggcggaacccctgtaatcatggaaaaagcttctgtttacggggagcttggcggcgagatagaggttcatgaacacgcagtcattctgcccggagtcgtaattgataaccccaccattgatgtgctccacatccggccagatgaaattgtggtggaacgaaaattcaaacgtgagtcacctgttattactcctcctcccgaatatcaaccgcaccctcgtgcctctaaaaagcgcagccgaggggaagaacgataaaaaacactgtaatttttttttagaaaggaagatgcctctgaacgaaacgaaagaactggctcaaattgttgacgaaaccattctgcccatggaacacagcggcggggatggctggacgattctgcacggggataccctgcaggtaatccgggcattcaagccgcaggtgttcgacgccattattaccgatccgccctacgcttcgggcgggtggaagccagccgagaaaaaccgcaccaccaatcaaaagtacagcagcatggacaaagaaaacgccctgcccgattttgacggagatcaaaaggatcagcgaagctggaccagatggatggctgaatggctttctgacgccagaaaagcctgcaaaccaggagcgccggtttgtctgttcattgactggcggcagtatccttctattaccgacgctctgcagtgggctggatggatctggcgtggctgtgcggtatgggataagatgaccagccgcccccagaaaggacgtttccgccagcaaagtgaatacatcgtatggggttccaatggtcctatgccggtgaatagaccggttggctgtttgcccggtgtgttccgttacgccaatcctcaaaacagaattcatgtgacggaaaagcccttgcagctcatgcgtgaccttgtgaaaatctgtgtaccgggcgggagaatcctcgatcccttctgcggagccggaactaccgttctcgcttcccggctggaaggatatgaagccgtagggattgaagtcaccgacgcctattataagctgggttccgaccgtgtgcgctttgcattggaagccgattcggaagaagaaacctccgaataatctccaaggctatccccgtggatagccataaacagacagtcatacaagcaggctatccacgtggatagcctgcccctttattcaatatatgaaaagaaaggaaatcactatggaaaaagcatttgcctatgtgtgcgccgcacccgatgccgcgccccgcctgttaaaacgctactgccgcaagatttatgaactgggatatgtcccgatctgcccgaaactttcggacagccagtacctgcagatggaaaatgccgatgaaaaacgggaatttcaaaatatttcccgtcagaaactgtgccgatgccgaatgctggtggtatgcggcaatgagatcagcaactccatgtccgctgaaatcggtacagccgaaaagcgaaatattatctgtacgacgctggaaggtctggcaaaaatcaaggaatcagatgaacatgacgggctctgattccagcgtggtattttcccagccggtgactggttttgcaagcatagcgtttggatatccaaacgcattttggggagaaccccaaacccccggcatccagccgcccatcgaatatagaaagaggtgagaaaactgaatcagaaacaatatgctgcatttgcggcaaacgccaaaacactggacagcctgcgccggaacgaggtgaattatgtccccggcgtttttgaagtgacaaaggtcatcgtcttgggcaaagaggattttgagaagctctcagaggacgtctccccggaatatcctttcctcaaggataaccgggaactgatgagcgccgatccgggcgggctgttccgctgtctgatggttaggaccaaaggagaacaggaatatatgctgattgcacaggggcgaaacagcctgtaccttggttatggaaaggactgccgcaaagtaaacctgcaggatgtaccaatggaacaccttgtgctggaagaaccaaaagcctatcaggaacacgctgtattttaccaccgtccccatgatctatccgatatcaacggtcaaaatctaagacatcctgcaccagagcgccagactgagtttcgagtagaacaggtggtggttttggctgatgaagaatatcgtcagtttcaggaaaccagatttttgcaagatcagattttcctgtttgattaccaagacaagatgtggttcgatcccggcagtctctgctggcactgtgtactggtgaaaggagaaaacagcagggacggaatccttgtagaatcagaaggatactgttatacccgatacgcagctttcgctccggactgcggcaagcttcgcctgcaggatatccctgtccattacgaatatccggctaaagcgccggagcagaagaaaagccgcaaaaggaaagtaccggagcgttaaaaaggagtccctatgagaaaacgaaatcacatcatccctcttcatttaaacaaaaaggaactggcgcatctggaaacacaggtgaaacaaagcggtctgccccgtgaggaatttctgcgcaccctcatcatgggagccgaactgcgtgcaaaaccctgcgatcaccatgcggacctgcttcacaaagtggcagggctttgcaataacgccaatcagcttgccaaggttgcgaatacttatggcgaagccagccagcagagcgtggaggaaatgaccgttatcgcccgccaggtttggaaagaagtaaaggagaattggtaaccaacctgcggttggatgcaatttgcgcacatagccaagatatgaattcgtctaagctgcccgcaccgaaaactcagaaaggagaaaaccgctatcgcatataccagcgttatccccgtccaccgccttgataacgccatcgactatgctctcgatgagaaaaaatcttcccgtgccgaaaacagagaatcgttggaaggagaaatcgataaggctctcaataaagaccagtcagaacaggatctgttccagtcagccatcggctgtaccatagactctgcctttgaggatatgtgtcagatcaaaaagatatggcataaggaaaaaggcgtgcagggattccatctggtgcagagttttgctcccggagaaatctccccggaactggcgcatcaaatcggaatggaatttgcggaccggctgctcggcgggaaatttcaggcggtggtcagtacccatctcaacaccaaatgcatccacaaccatattgtgtggaactctgtctccatggaaaacgggaaaaagtaccgcagcaatgaaaaaacctatgtaactggggtgcggaagatttcggacgaactgtgcgtaaagcaccgcctttccgtcatccatacagagaaatcggaacgggtagcccgtccttatgccctgtggctggccgagcaaaacggtacctacacatggaaaacacccatccagaaagatatcgaagaagcgattgccgcttccctcacatggaagcagttcctgcgggtgatggaaaaacagggctatgctttccggtttgaccgcaagtacgccaccatgatcctgccgggtaccgggcgcaccgttcgttttaaaaccttgggaaaaaactacaccccggaagctatccaaaaccgcatcctgtatcctaagcctcctcaccgggctgggaaacaaacacctcctgccagccgcttccttattcttcttggagaaaagccgccccgcagaatttccggcttgcgggcgctctactattcctatctctacaagatgggggcgctgccgaaaaagccccggtacccaagctttgctgtgcggcaagatatccgcaagctggatcagcggatagaacaggctgaattcattttcaaaaaccatattgaggaccgcgggcggcttcgtgccatccgtcagaaagcggaggatgaaatcgcagtgcttctaaaagagcgccagaagctctaccgttatcagccagattccccgcagattggcgtcctcacagaggaactcaaaaagctgcggcataccgtcaagctgtgccggaatatcgaaacccattccattgagatggaacagcgcctgcaggcagcacagcaggaagaacagcagcggcaggaaaagcagacacaggaagaaaagaacaaacaaacccgaaatcgggaaaatcaaaaaaggagatgatcctatccataaaattcccacaagagaacaggtggaactcatccgccgacaatatcctgtcggaacccgcatcatcttaaatcacatggatgattcgcaggctccgcctccgggtacaaaaggcaccgttgcctatgtagacgatatcgggcagatcggagtgaaatgggataccggttccagcctgtccctgattcccggcgtggattccttttctaaggaacctgcgccggaaaaagcaaaacacaaacgctccagcagcttggaacgatgaaaggagaatgctgactgaactacggaagcgatcctgccgaccagatcgtccgatttacccttgaagggaccgaagtagccctcaagctgtcgggactggcggcgaagaattttgcgctgtttgtttatgcagtgctgaaagaccaaaagaaaacccatggcaagacaaggcttgtccgaatgcttcgtgagcagcgcccgtttaagttttttaatctgcctgcaacgtacatgaaagaatttgtgcgggaagccaaaggacacggtcttttgtatgtgcccatccgtaataaacaaaaaggcgattacatcgaattggtggtatttgcggatgacgccgctaagattcagcgtatctatgacaatctcggcttggattatgtgaaagcggaagccggagaagccattgtggagaaagcggtggaacaggagaagcaagctcctgccgcttcccaacccggcaaaacggaaactgtccaaaccgagcagggcgctgtggaattcgaggtgggcggctttgaagatgacttcaatatcagtcctgccgggcagggtgaagccgaaaattttaccattggccgggagaaggaatcaaaacccccggcagcggaaaagagtccgtccgagccttccttgcccagcaaaaactcttcgcccggcttaacaaaccgtgagcagccggagcaaaagccttcggtgaaaaaggaactgcaggagatcaagcaggaacaagtgaagaaaaaagaggaaaaggccaaacagcaggatcgtcagcatcctactccgggccattcccgtaaaaagaagaaaaaacagaaaggcaggtaatgcagtatcgatttatcaaatttgatcggcagaaaacaggaaactcagcctcagccggaacagcagtacaccaaggaagaatatgcctccatgaaacaggctgaacgtgaggacgcatgggcaaaagtggatgctcaggcacaggaagtgttcaaagatgacgcttccatgaagggcttcttaggttttatggctcagtgtaccccgcagagtacccgcaaccttctcatcctatatcatcagaacaaggagatcacccatccccgcacctttgataaatggaaggaagccgggcgctccatccgttccggtgaaaagggatacaccttctttgcggatcaggaatataccaaagaggacggcaccatagcgaatggttataccattaccaaagcctatgatatctcccaaaccagaggtccacagcctctgccgccgcagaaacatctgccggaagaaatcattgccgctatggtagaacagagtccggttcagcttgccatctcggatcagcttcctcaaggggtacaggcacagtatgttcccaaacagcatacgatttttgtccgcaacgggatggatgaaaccaccactatctgcgctatcgcacgtgaacaggcccatgccagcttcgatactgtcggcagcggttactaccgtcaggcgtatgcggcacagagctactgtgccgcttatgtggtcgcacagcggtgcgggctggatacttcggccttccggtttgacaaggtatgcgaaagctgtgctcaaatgaccccggaagaaaagcgtggtttcataagcgatgtgaaacgggcgtcttattccattaaccgggatatacagcgcagttttcgggatttggagcagacagtccagcccgatgagttttcggtagaaacgcagaagcctgccaaaactcccaaatccaaatcggagaaggaaacggaacgatgagaaagcgaaccgccggaagttttccgtttgttttcttttgtgcggtagctttctgtccgccgctgtggtatggtgaagctgaagaaaatacagagaaaggcagggatatccttggaaaaacaacgtctctttaagatgggaatgctggaaaagaattttctggtcaaggcgctctgcgacgcacaaaaatcatccggatcggaaacctccggcgaggtgcagagccttatcaataaaaccgtcaatgcgccaaagggaaagctgtacctgagcgacacggaattccagtatgcggcacagtctttaaatggaatgcgcaacgcttatctgtctgcgggcagaagcagcggcgggattgaccgtgttctcgcaaagctcatgagcagtaaatatcgaaacgtgccggttcgataagatttaaggttacccgttaccccggaacctgtgggaatggttttccataggctccggggtttctttttttattttgatctgaagaaaggaaggatattttttgactccattgtaaaacgaaagaatccatggtgggtatggcttctgccattgcccatcgtctggtgggcagcgcttttagtggctggaagctggtcagatggaatgagtcttgtggatctgctgggaaagctttcggcagcgatgaacagtcccttttccattcattggacggattattctcttcggtgcctgtttttcttttcccttgggtacggggtgatcgcccttgtggtgacctccaaccagaaaaaccgccgccgtggagaagaacacggttccgccaagtggggcgatgtgttccaaatcgccaagaaataccgggataaaaagaacccgaaacaaaatctcatcttaacacagcatttccaaatggggatggatgggtatcggcacaagcgcaataccaatgtgcttgtgatcggcggctccggcgcgggtaaaagccgatcttatgctatcccgaatgccttaaactgcggcagctgttctctggttatctgcgatccaaagagtgaaatcctgcgaaaaacaggcggtgcgctcaaagcaaacggatatgaggtgcgagtgtttgatctattaaaccccgacgcctccttttgctataacccccttgcttatgtgcgggatgacaaggatgttcttcgcctcatcgaaaccctcatccagtcgactactccgcccggagcacagagcacggaccctttctggacgaaatccgaaacagcgcttttgcaggcgctggtgctgtacctgatgcatgaagcaccgccggaggaacagaacttcgccatggtaatggaaatgctggcggcagcggaagtccgggaggaagatgaggaatatgagtctcccttggatatccttttcgcaaggcttgaaatgcgggacccggagagcattgccgtgaagcaataccatgtctttaagatgggagccggaaaaactctgaaatctattttaatcagtgtcggcgtccgcctctctgcttttaatctgccacagatcgcaaggctgacctacaccgacgacctccatctggaagaaatgggcgaaaagaagatcgccctgttctgctgtatcccggacagtgacaaatccctcaactaccttgtgggcatgatttacgggcagctcattcagacactctattttgtagccgaccgcaaatacaaaggcaggcttcctgtgccggtccatctgctgattgacgaagcgccgaatatcgccctgcctacggataacttcctaccttggctttccaccatgcgaagccgcaatatcttctgcagctacatcgcacagaatatggcgcaaatcaaggcattgttcaaggaacagtgggaatcgctggtgggcttgtgtgatgagtttctctacctcggcggcaacgagaaggaaacccacaaatatgtttccgagctcatgggcaaggaaacattggataccaacacctatggtcacagccgtggaagaagcggcagctttagtgtcaacgaccagcagacaggccgggaactcttaacgcccgatgaagtccgaatgctggataaccgcaaagccattctttttgtaaggggtgaaaggcccatgctggatgacaaatacgacctgatgcatcacccaaacattcgcctgacagaggatggcggcgctgcgccctacgactacacacatgcgaaggacgccgcagacgatctcgattattccccggaccagtatgaggatttcgaactgctggaaccggaggattttctcaaaccataataatttacatgaaattggaggaacgcttctgaataagtttctgaaaaaaattggttctttgacgaaccgcaaaaaggacaataaacccaccaatgctctgccgcttggtaaaaagggacgccttggattttccagctatgccgctgtagtattgtgtgcctgctgcctttccactactgcctttgcagccagcggcgatcctctcggagtagtaaacaacctttccacattcattttctccctgattcgtgccatcggtatgatcctgctgggctggggtgtcgtacaggtcggcctgtccttccagagccatgatccctcccagcgttcgcagggtttcctcaccttggccggtgggctggtaatcaccttcgccaaggaaatccttgaccttatcaccgcctgattttctgttttccagcaaagggagcgtccgcattgggcactccctcattttttcagataggaggtgaccagccggaaactggatcatagacaacttaaattcagcgctgggtacatggaatgacaaactggctgaaatctggacactgcttacccaagaccccgccactttcaagggcggcgggatctggcaggttatgctggatattaacggggcgctgaaagccattgggtatggtttgctggtactgttttttgcggttggcgtcgttaaaacctgcggctcttttaccgatgtaaaacgcccggaacacgctttaaaattgttcatccgctttgctttggcgaaggctgctgtaacatacggacttgatttgatgcttgctgtatttaaaatcgtacaaggaatcatttccaccattattacccaatcgggtttgtcaggaagcagcggcaccacactcccgcaggaaatcatcgataaaatcaataacgtaggattttgggacagcatccctttgtgggcggtaacccttttaggcggtctgtttattacagtgctgtcctttatcatgattttaacggtttattcccgtatgtttaaactctatatgtacacagcgcttgcgcctatccctctctccagctttgcgggagagccaaccagcaatgtgggcaagaacttcctgcgttcctatgccggggtatgtttggaaggggccatcatcgcccttgcctgtatcatcttttccgttatggcggcttctccgccagcggtcgatcctaacgtctcagcggtaaccgccgtatggagttatgtaggcgagctcatttttaaccttttggttttagtaggagctgtgcggatgagcgaccggatcgtcaaggaattgttaggtctgtaaggccgtgaaaggagtgaagcaatatagaagtaaaagtaccaaaggaaatccgggattatcaggagtccatcttttttggactttccacccgacagtttatctgttccctgcttgcagtaggggtagcagtcggtctgtattttggtttgcgcccgctgattggcagcgaagaagttggttggatgtgcattcttggagcagctccattcgctgcctgcggcttctttaagtaccatgggatgaccgccgaacaagtggcatgggcttggtttaaatcagaatttctgtatccgaaaaagcttgtgttcaagtctgagaatctctactacgaagccttgaaagatgccattgcagagggcgaaaagccgccacgcaaaaggaaaaagcgtaagtttcagccaccagctgggaaagaacagtaacctttttcatttttcgcactgaaaggaaggatgcctattatcaaaacgcttgtcaaagcaacgaaattagagaaagaaaaattcaccatcccgaagtccgtacaggatgccatccctatccagcgcatctggccggatgggatttttcaggtaggaagcaggttttccaaaaccttttcctttaccgatattaactatcaaatcgccggaaaagaggacaagacagcgatgtttctcgattattcagagctcctcaatgcgctggattccggagccagcgccaagatcaccatcaacaatcggaaaatcaataaagcggaatttgagaaatccctgctgcttcctatgaaagaggacgggctgaaccatttccgcaaagagtacaacgagatgctgctctcgaaggtaaccggcaccaacaacagtgtggtgcaggaccgttacatcaccatcacggtagcgaagcggaatatcgatgaagcccgcacctatttctcccgtgtgggtacggatctgatcactcatttgtcccagctttcctctattggacgggaactggacgccggaacccgcctgcaggtgttccgggatttctttaagggcaatgaacctgccgcttttgcctttgatctcaaggaacagatgaaaaagggacacaacttcaaagattggctttgcccggacagcatggaattccagaaagatcacttccgtctgaacgaccgctggggcagggttttgtatttacaggggtacgccagctatatcaaggattccatgattgctgaactctgtgatatggaccgcagcctcatgctctccattgacattttacctgttcccaccgatgaagcagtaagggaaatccagaacaagctcttgggcgtggaaacgaatgcggcaaactggcagcgaaagcagaacgcagccaataacttttccgctgtccttccttacgacatggaacagcagcgaaaagaaaccaaggaaatgctggacgatctgaccaacagggatcaaagaatgatgttcggtctcgtgaccatggtccatctggctgataccaaggaacaattggacagtgacacagaaacgattcttacaacagccagaaaacatctgtgccagatgagcgtcctgcgctggcagcagaaggatgggctggatactgtgcttccttatggtttgcgcagaatccaagccatccgtaccctgaccaccgaaagcaccgctgtgctgattcctttccgagcacaggaaatcatgcagaccgggggcatctactatgggcagaacgctgtttccaaaaacatgattgtagccgaccgccgcaagctcttaaacgggaacagcttccgccttggtgtttccggttccggcaaatccttcagtgccaaagaagaaattgtgagcattgcgctgtcaaccaatgatgatatcctgattctggacccggagtctgaatttgggttcttggtagaagcgcttggcggggaaattattcggatttccgcagcctccaacacccacctgaacgcccttgatatggacaaagcctacggtgacgagcgcaacccgctgattgaaaaatcagaattcattctctcgctgttcgagcagttagtaggggcaggcggtgtgtctgccaaagagaaatctattctggaccgctgcacctatgatgtgtaccgggagtatatggcaaacaattatgagggtgcagctcccacgctgaaagatctgtaccattccctcttaaagcagccggagccggaagccagagggctggcgctttcctccgagctgtttatcaccggcagtctcaacacctttgcccagcacaccaatgtagacaccaaagcccgcatcatcgcctatgatatccgtgaattgggcgaacagctcatgcccatcgggatgttagtcaccctcgatgcgattttcaaccgtgtgatccaaaactggaagaaaggaaaaaccacatgggtatttgccgatgagttttatctgctgtttcgctaccagtacagcgccgattttttctacaagctgtggaagcgtatccgaaaatataacggccttgtgacagggctcacgcagaatgtcgaggagctgctccgttccgatactgcccgcctgatgctggcaaactcggagtttttgctccttctgaaccagtcctccaccgaccgggatgaactggcaaatctgctccatatctcggacacccagcttggctacatcaccaatgtatctgctggctgcggtctcatccgctgtgctggcaacattgtaccgtttgaaaacagcttcccccgcaatacccgtctgtaccagctgatgaccaccaagccggacgaagcactgaggggggtgtaaacctatacatgaaacaacatcgcagcagggagcctcctttggctccctgtatcttttttaggaggtatgccattgaaagaaattaagaccaaaccggaaaatggaaaaccaaggcttttggatagtgccgccaaagccccaaaaaccgcaatgaaggatgcatggctgaaatccaaggagaaagccgtatcggaattgaaggggacgccttttgccagccagcagggagaaacctccaacgcccccgctaacagcgccggagatcaaatgctgtccggtatcgaaaccaccgcaaaaaagagtgccaacattacctatcggggcgggaaaaaactggcgcagaccaccgctcggaaagtcaaagaaaaaagagaaatttcccgtaccctctcggaagcgaaaaacgctggcagcaaagcaacggagatcacgaaggataccgcttctaaaatacggaccaaaaataccgctgccaaggcggtcaaaggaaaacctcaaaaagcagtaaaaaccgccagccgttctatgaaaggtgtgaagaatagcgctaaaggtatcaaaactgcccagcgctcggcaaagactgcacagcaggcagccaagacagcgcaggccactgcaaaagcggcacaaaaagccgcacaggccgccaaggctactgcgaaagcaacaattgcaggagttaaagcggcggtccgtgtaactatagcagcggttaaagcaaccattgcggctgtaaaggggttgattgctgccatcgctgccggaggttgggtagctgtagtgataatcttgttaatttgtttgattgccctgattgtcggttcctgtttcggcttatttttcggttcggattctacgggaaccggcaccagcgttacgcaggctgtgacaactttaaacggggaatttcaggcacacattcaagaaattgaagatagcaatagccataatcgggtggagtttacttcaaatgacggagtgctttctatcaattgggaagatgttctcgctgttttttctgccaaggtgaccggtgcggaagatggcactcaggtggcttctttggatgacactcaagttcagcagatgcgggatattatgtgggagatgaatgcagtgtcttccagcacccgtaccgagagccatgaagtggaagttaccgaagtagacgaggatggaaaagaaactacccgcaccgaaacggtaacggaaaccattctggaaatctctctaacacataaaacagcggaggaaatggcgcagcagtacaatttcaatgcaaggcagaacgaataccttgccttaatgtcggagccagaaaatcagaatttgtgggcagaactgctgggtggttttaacagcggcggtggtcagatcatgaatccaaatactgattgggaagggaccgggattttccaatggcctcttccgcaaagttataccattacctcatggtttggataccgtgaggacccctttactggagaaattgcctaccacagcggaaccgatatcggcgctccgggtggtacaccgattctgacagcggcagatggcacagtcaccattgccaatgccatcgacacttggggcggcgggtatggatactatatcaagataaaccataacgatacttttgacaccctgtatgcccactgttcctctatctgcgtgaccgtagggcaggaagtgaaacagggcgaagtcatcggttatgtcggtaccaccggcaattctaccggaaaccacctgcactttgaagtatggcagaacggagagcgtaccgatgcgcttggatattttaaagcgaaagaataaaaatgctattctatttataacatcaattgcgctgttcttgctttcatacagaaattgtgatagaatgtagttagtcgttgctaactacattctatcacatgacataatttctattagaagggaggagaaactatgtgttaacagaatttttgaaaagtatccgaggtgaaaaagccttatgggaaacaataataacaggtgtggatgtttgcaattttcgtcttcaaggcaatacaaaggatccatttatcccgatatccttacagccacttcactttgaagttttcttttgttttgcaggtcatgttgtactcaaacaacaatggaatcgtgtggttgttgtaagaaagcaggaaattcttttactatctgaggtatcttcactgtattccgtcgcatgtacagcggatttggcaggaatattggtatccgtagatgcgactacggcaaaagagagtttatattccctatgtcgtatgatgggagacttaaaattgaatacttttgaagtaaaaaaatatatggataagcaagatggatgtgctgttattcatggttcatcttgggttttttctacattttctgaaatagtcaaaatggaagactttcaaaaaagcagatactgcgtttggaagtcagtagaattgctatttctgctaagtacaggaacattgtatccaaaagataaagataatcttaaaataagtaaggtaataagagaagagataaatgagatttgcaattatatggagatgcatctggatgaaaaaataacgattgattatttgtgtcacaaattttatatatctcctactacatttaaaaaatattttcgcagtattcgtggtcagccggtatatacttggctatcacataaacgtatggaaaaagccgctgaacttcttcggtgctcttctatgactgtactggacgttgcacaggcaattggatacgcaagtttaagtcaattcaatgtagcttttaaaaggcactttaattgtacacccagacagtatcgaaataggtctgattccattggtttttgtctgtttccaaaagaatgatttagctaaagttgttataataattagacaaaatctatgaaggagggatctggttgaaacagcaccgtttttgggcatggggagccgtgatctgcctgctcatggtaatgattacaggatacaaaagaaaataacggaaaggaagattctatatgagtttatacaataaattggctctttttgtaggtggcacacttttcggatcggttggaattaaactgctgtccagcaaagacgctaaaaaagcatatgttcacgcaacagccgcaggactgcgtatgaaagattatgtcatggaaacggtaacgaccgtgcaggaaaacgcatcggacattttagcttctgccaaagatctgaatgaagaaagagctgcaaaagaagcggaagaagcggcagccgcacaacttgaaacttctgaggaagagtaacagaaaagagccgttgatacggctctttttttatgaaggagaagcgacaaatgaaggcaattattttacacgaaagcaaagggcgtatccgttttcgaatcggtcagaaaaaaatgactttgcaggaagcagatgtgctggaaaattggtttcaaaagaaatcatggatcacacaagtaactgtccatgaacgcaccgggtgtgtgattctgcaatactccgggtcacgtaaggaagtgctggcggctatccgtgagtttaacttgcaggaagcgcaatcacaaatcactttgccactgcacagcagccgtgaattaaaccgtaaatttcaggaaaagctggtcggaaaagtggtactaaaagcagcgtctatgctctttttgccgaaaccattgcagatcgcacgaattgtatggcatatgctcccttttttgaagagaggtatccactgtctttggagaggaaaactgaaggtagatgtgctggatgcactgtccataggaatttccgcatttcgcaaagatttcggaacagcaggaaccgtcatgtttctgctggaactgggcgaactgttggaagaatggaccagaaaaaaatcaatggaagaccttgctcgctgtatggccctgaatgtggatcgggtatggctgaagacaccggaatcagaaattctgacagcagtatcagatatccgcccaggtgacaaaatcgtgattcgtaccgggagcatgattcctatggacggtatcttagccgagggggaagtcacagtcaatcaggcttctttgactggagagtctgtaccggtcgtaaaacacccgggaaacaccgtgtatgccggtactgtcatagaagaaggcgagtgcatactggaagtaaaacaagctatgggttccagccgatatgatcaaattgtaaccatgattgaaaaatccgaacagatgaaatcggcagctgaaagcaaagcggctaaccttgcagataaattggttccgtatacctttgccggcagtatcttgagctttctgctgacacgaaatatcctgcgggccttgtcggtacttatggtggatttctcctgtgcgttaaaattttccatgccgctggcggtgctttctgccatgcgggaagccggaaaagaacatatcactgtaaaaggcggcaagttcttagaagcggtggcggcggctgataccatcatatttgacaaaacaggtacattgacacatgcttgtccgaaggttacgcagatcatcactttcggagaacgaaatgagtcggatatgctgcgccttgcggcctgtttagaggaacattttccccattctattgcaaacgccgtagtacaagaagcgcagtgcagagggttatcccatgaagaatttcattccaaggtagaatacatagtggctcatggtattgccagtacggtaaatgaggaacgggtattgatcggaagtgcgcacttcatttttgaagatgagggagtaactgttccgctaaatgaacaggagcgatttgatcgtcttcctgaagaatattctcatttgtatttggcgattggcagagagcttgcagcagtgatttgtatttccgatccgctgcgcagggaagctaaagaagtattgactgcgctgcgtgctttgggaattcaaaaaacagttatgctgacaggcgacagctatcggacggcatctacggttgcaaaccgcttaggggttgacgcattctgcgctgaggttcttcctgcggataaagcaaaatttgtagccgatttgcgccaaaaaggacatattgttttaatggtcggagatggtatcaacgactctcccgctctttcagaagcggatgcgggaattgccatcagtgacggcgcagcaattgccagagaaattgctgatattaccattgcggcggacagcctttgggagcttgttaagctgcgtcgtattgcaatggctttgatggagagaattcactcaaattatcggtttgtcatcggatttaacgggacgctgataggcttgggattggcaggaattttacctcccgcagcatcggccgcactgcacaatctttctacgcttggcgtcagcctgcgtagtatgagtgctctgccggaacccaaacaggataatgaccgctgtatatagccggacaaccaaaagagagaaacctttgtgtagtttctctctttttattcatccataaaaaatgcagaagcacttgacattcagcttaagagcaactataatatagcagtgatatatagcaccgctatattttttaaggaggcgtgtaccatagatgagaatctgacaactttggatcaaatccatgaggcggcaaaagcggagtttttgcaaaaaggctacaaggacgcttccctgcggaatatcgtcaaatctttgggcaagacactgggagccttttacggttattataaaagcaaagaggaactttttgaggctttggtgggcgaacattatcaatacttgattgatcgctttaaggacgctcagaagcaatttgccgacctgccccatgaacagcagccggaagtgatgggcgatatatcaggggtatgcatgtttgatatgctgcattatgcctatcagcatttagaggaatgtaagctcattctttgttgttccgaagggacccgcttttctgggctgattgatgagatggtggaaattgaagtggaggggacacacgcttatcaaagagtgctggcggaattaggcagaccctccccgccgcttgacccaactctggagcatattttgatcaccgggatgtttcatacgttttttgaacttgttatccatgaaatgccgcttcccgatgcggaaaactatgtaaaggaaatgcgggccttttacaccgcaggatggatgaaaattatggggcaataacgccctataatttttgacttgcagttagcttaaactaactaaattagatataagaaggacaaatcattgtcctctgtatcataaatgaaatgtaaaggaggaattctcttgaaaaaacaatctaatttatcgcgcctgctcacgattgcgggaagttaccgatatctgacctatgcgtcctggatcctctccgcaatcagcgcattgatcgcactcgtgccttattattttatctggcaggtcatgcgtgaagtgctggaagtcgctccggatttcagccgtgcgcagaatctgacctacaacggctggatggcagtgatgtttgcggtcattgcggtactggtgtacatcgccgggctgatgtgctcccatctgggcgcatttcgcattgccaccaatttgcgtttgcagtccatgaaccatatcgtaaaactccccctgggatttgcggaacattttggcagcggtaagctgcgcaaaatcgtcaatgaatccagcgctgctacggaaacctatctggcacaccagctcccggaccgtgcgaacgccctcgcaactccctgcggtcttctggttctgctgtttgtgtttgactggcggctgggtcttttgagtttggcgccggtacttctgggctttctcattatgatggcgatgaccggaaaggaaatgcagcagaagatgaaggaatatcagaatgcgctggatgatatgtccaatgaagcggtagagtatgtccgaggtattccggtggtaaaaacctttggccagaccatcttttcctttaagaagtttaaggattcaattgaccggtacaaggtgtgggtgattgcctacaccaagcagctgcgcacgcctatgatgttctataccgcggccattaacggtgtgtttgtctttttgatcgcaggagccttgctgtttacgcaggatcaggtcacgacagaatttttgctcaatctggtattctatatcatcattacgccgatcatttccgtgacactcacacgtattatgttccagagcgaaaacgctatgatcgtggacgatgctttacagcggattgacagcgttctgaatttggagccgctgaaagaaacagctcatcccatgcatccgaaagacggctctgtagagcttgaacaggtacatttcagctataacggagaaaaggatgttttgaatggcatatctatttctattcctgccgggcagacagtcgcttttgtgggaccgtccggcggcggaaaaaccacgctggcaaatctgatctcccgcttcttcgatcctcaaagcggtactgtaagggtgggcggcgtagacgtccgtgatattccgaaagaagaactgatgaacacggtttcctttgtgttccagaacagccggctgatcaaagcttccatctttgagaatgtgcgtctgggtaaaccggaagccacccgggaggaagtcatggctgccttaaaaaatgcccagtgcgacgatatccttgaaaaactgccggatggtatggatacggtgatcggcaccaagggggtctatctttccggcggcgagcagcagcggattgctattgcccgcgtgatgctgaaaaatacccccatcattattctggatgaagccacagcttttgcggatcccgacaatgaaaccagagtacaggcggctttttccaaactgtctcagggcaaaacggtcattatgattgcccacaggctttccacggtggccggtgcagatcggatttacgttgtaaaagacgggcagatcgcagagagcggttccagccgtgagctgatggaaagaggcggtctgttcgcccggatgtggcagaactatcagacttccattcagtggaaggtacaaaaggaggtacagtaagatgatcagacgtctgcaaaaacgatatgccttgtccgaacagggcgcaaaggatttaattaagggctgttttgcctgcgtcctgcaaaatatctctttcatgttcccggtgggattgctgtactgcatggtgagcgatctgatgaacggcggtgttccggaaagccggcttcccttctacattgtcggctgtattctctgtgtgggattgatcttgctgacaacctacttccagtataacgccacctattttgccacctatacggaaagcggcgtgcgccgtattacgttggcggagcggctgcggaaaatccccctgtccttcttcggaaagaaagaccttgcggatcttaccagcaccattatggcggactgcacctttttagagcagagcttttcccactttatcccggagcttgccggatccatcatctctacggtcttgattgccgtcagcctgttcttctacgattggcgtatggcgctggcggctctttgggtgatgccggtggcgtttgccattgtaggtttttctgcaaaggtacaggaagggtttaatcagaaatccatggatgcgaaaatggcctgcgcggatggaattcaggagtgtattgaaacggtgcaggatctgaaagccaacaacgctgaaaaagaatacctcaaagggttggaaaagaagatccgcgcggtggaacaccgctccattctcaatgagttcggtttggcggcatttgtagtatccgcatcccttgtgttaaagcttgggattgccacggttgcgcttgcaggctccgttttgctgatgcagggtagtttggatattttgaccttcttcctgttcctgctggtggtttcccggctctatgatcccttgcagggtgcgctgcagaatctggcggcggtaatttccacccggacaaatatcgcccgtatgaatgaaatccttgaccatcccattcagcagggcaaaaccagcctttccaatcaggggtatgacattacctttgaccatgttgggtttgcctacaacaccggagaaacagtattaaaggatgtcagctttactgccaaacagggggaagtgaccgcactggtgggtccctccggcggcggtaaaacaacagtgtcccgtctggcagcccggttttgggatgtgagccggggaaaaattacggtaggcggtatggatgtctcaaaagtggatccggaaacgctgctttctctttattccattgtgtttcaggatgttaccctgtttgacaacaccatactggaaaatatccgtatcggtaacaaagacgccacagatgaggaggttctggctgcggcacggcttgccaatgtggatgaatttgccgagaagcttcctgataaatggaatactaacataggcgaaaacggttgtgagctctccggcggagaacgccagcggatttccattgcccgtgccttcttaaagaacgcgccgatcatccttcttgacgaagctacagcctctctggatgtggagaatgaaacgctgatacagacagctctgtcacggctgatcaaagacaaaactgttctggtgatcgcacaccggatgcgcacggtagccggtgcggataaaatcgtcgtgctttccgatggtatggtggcggaagagggcgatccggataccctgctccagcaagacggtatctatacccgcatggtaaaattacagacagaaagccagaactggacgctggcatagtgtgattttctgttgcgggcataaaccagatgttaggcaaatgccgcacgcaaaacattactatttttgagtgtggctttgtctatatctggaaacactttagtacagtatcttgacaaaatgatgtatggtatggtaaaatcaatcagttagagttagctaactatttttattttattttggttagccggtgctaaccgcatggggatagaagaatgctaaaagtaacaatgaaaatcgatggaatgtcctgtggaatgtgtgaggctcatataaacgatgcgatcagaaaagtattttctgttaagaaagtgacttcttctcacagaaaagggatcacggaactgcttatacaagacgccgttgacacacagttactgaaacatgctgtggaagaattcgggtataaggtgttggatattcgttgtgaaccttatgaaagacaagggttttccctgtttaaaagaaaatagatgagggtgaaaagacatgccttttgaattatggcaggggctgctgattccttttgccgggacgacgctcggcgcagcctgcgtcttttttatgcggaacaatttgagtgaactggttcagcgtgcgcttaccggctttgcggcaggggttatggtggcggcttccatatggagtctgctgcttcctgccatggaacaggcatcagacatggggcaatggtccttcttccctgctgtagctggattctggcttggtattttattcttactgggattggatcggctgatcccgcatctgcatcgtggcagctcagaggctgaaggcgtcaaaagcagtcttggaaaaacaactatgctgactctggcagtagcactgcacaatattccggaagggatggcagtgggcgcagtctatgccgggtggctctacggggacagtgggatcacgctggcgggggcgctggctctttctctgggtatcgccattcagaacttccctgaaggcgctattatatccatgcccctgaaagcggagggtttctccaaatcccgctcatttctgtatggaacgctgtccggtgcggtagaaccgataggtgcgctcctgaccatccttctggcaggaattttagtcccggtactgccctatgctctgagctttgccgctggtgcaatgatttatgtggtggtagaggaattgattccggagatgtcggccggaaagcactccaatgtgggaaccattctgtttgcagtcggtttcactttgatgatggtattggatgtggcgttgggctgatacaaagctgttcgaaaaaggaggacacagaatgtcacatttaggcgttgtggaggacacactttttgtccccatgctgggcaggatttatgccagcgagcattgcccgcagatcatatatgataaaaaggctttggaattaaaagaaaagctgccgtccgacctgcaggaaaacggcagtcagagccagtataccctgctggcttcagcggtgcggtctgctaatatggaccgtttcatccggtcgtttttaaagcgcagaccggacggtgtgattgtccagctcggctgcggtctggagacgacctattaccgctgcgataacggaaggacccgctggtatgccgttgatttgccacacgtcattgactaccggaaggaactgctcccgcagtcggagcgtgagacctatcttgctggagatgcttttacagagaattggatcagacaagttcgcacggatttgcccgacgcccctatccttgttacagcaggcggactgtttcactattttgaggaagataaggttatttccctgtttcgtatgctcagacaattcggagaaatagaagtcgtctttgatactgtgaataaaaaaggcatggctatgatgcaaaagaaatacatgaagcaggtcggccacgccgatgtgcagatgttcttttatgtggattcagcagtgaatttagctggaaagattggcggtggacttatggatatgacagaagagccttactaccgttatattcccaaaaacggcttaaaactatccaccaaggtcagtatggctgtttctgaccggttctgtatggtgaagatgatttgtttgaatttatagtgttttcactttatacgaatacaatagcggagggaattttaatgttggaaaaagaaaacttaacgccgtttcaaattcagctgctgctttattacctgacggcggaaccgtcaaagcgtacggtaacggattcagccagaagcctgaatgtgagtaaatgggtggtcactcgtacgctggatacgctggaaaagctgaatattgtagaacgtctggagaatcgcaaaacggttttgacggttccgggagttaaactggcagaaaagtatcagaaacagagaaaggtattagaaaaatatatgcagtatcaggatatccctcctgcacagattaaggagaatgcccttcgagcattggcagcaaggttttctgatgaatttatggatcggctggctgaacaggaaagccggatgcatatcaaagaaatatttgccggacgccgagacttccatggcggggatatttgtaattacctcagtgatggcagttactattttccgttcattatttaccgggaacaaatcaaaaatcacaataacctttccatggcaaaccgtggttttgaaaatccgtgtgaagtcatcgtaaaggatcatgaaggacttgtgtatctggcggcaaaaaccgtatccgctcagtctatgtccagtaaaaataaaatggaaggacgcatccagaagctgcaatacttatatgacggagaattccgtgacggcggcattgacgggcgttatgtattttttccggtaacggcactgcggtttatctctatgggaaaaggccgggataccctgctgcatggaagcgtatgcctgaaaatgcaatgcagtgttggggatatgcatatgccggagagtacagctgttttcaccatgttcatccattaaaacaggcggattcagaagaaatgaaaaattttttggagcagttttgcaacaatgctggtttatcagtcatgatcggggtttagacgcttttttaacccttcaacaggctgtttggagcagttttgcaacagaaaatccattgacaacaaaatggtaactggctatactgaatttgctttaaggaaaatgcggattataaaagcagtatattttatcattcgcagccctgtttggtctttgagaccggacagaagagtaacaggagagcagagtcaaaagcaatatgacaacaacgatccccctcttaaaaactccgaaaggagcaattttttaggggattagttagcataacctaactcagacggataaccttttgcctctgcccgtttatatcagggaaacaagcgtgttaacttgttctcctgaccagaacatcgcaaaaggaggattggtgcgcgatattttttattatgccgtagaaacggcattatttttcaccaagcggttagattatgctaaccgaaacattgtttttataaatgaatggaggtagacacaatgacaacaacaaaacagtcatggtttaagcgaagtttggctgtgctgctggcaatcatgatggtcatgagtttgggcgtgactaaactatggccagtaatatttttaccgtaaaaaatctttccttttcctacggaaagcagcaggtgctgaacggattggacttttctcttcacgaggggagaattaccacattgatcggtgcaaacggatgcggaaaatccacattgtttaacctgatgacgaaaaacttaaagcccgatcagggggaagtgtttctgagagaggaaaatatcgcaaatttgcgtttaaaagattttgccagagaagcggcgattgtccatcaatacaatacggcgccgccggatcttacggtcgaaaagcttgtgagctacgggcgaactccctatcataccatggggctttcatcggatccgcaaaaagatgaagaaaaaatacagtgggcgctggagatcacccatacaagcaagcacaaggataaaccggtaacagagctttccggcggacagaaacagcgggtgtggattgccatggcgctggcacaggacaccaaggtactgtttctcgatgaaccgaccacctatctggatgtccgttatcaactgcagattttaaaactcattcagaagctgaaccgggagtacggtattaccatcgttatggttctccatgatatcaaccagtcgctgtattacagtgacgaaattgtcgccatgaaagatggcaggatgattgctcacggtttaccggaggaaatcattacaaaggaacttgtccaagaggtatacggcgttgatctgaccattcagtcggtagatggaaaaccttttgttatcccggtataagggataaccctgaatacatggaaaggaggcataagccgtatgaaacaaagaaaaacggtggaggattatctgaaagccgtgtatttgctgcaaaagcaaaacggctccgtacgtggtgcggatattgcagcagagcttcatgtgtcgcgtcccacagtttccgtttcgctgaaagagttggaaaaagaaggctatcttttcttagacggtgcgcgggaagtgcatctgacagataaggggcaaaccgttgccagagaaacttatgagcgccaccagaccttccagtcccttttagaagacctgggcgtggatgggaaaactgcggcggaggatgcctgccaaatggaacatgccgtaagtccgaaaagttatgaggcgctgagaaggtggacaaacagaaagaaggcaagcggctgtgaataatgcaatgcaatcccttttttacggttttacatcagtgctgcttgtgatagcggttgccgctctgtgtacaggcgttaagaaagtgatgaaaaaaataacaaaaggcggacgaaaatatgatgatcaataaacggctcatcggtaccgttgccgagagcaaaaaatacatagcgggaaatgtaattctacagtggtgctcccttacggcgaacattgccctgatgctcagtatttcccgaatgcttgcagagcttttcaggggttcggcctcggtgcagcttttcacagtgacgggaatcgttgtaattttggcgttggcagtccggtttttctgctccatcggggccgccaaaatggggtacttctcctccaaagcagtcaaaaagtctttgcgtgagaagatctatcaaaagcttttgcggttgggaagctcctacaacgaacaggtgaaaacttcggaagtggtgcaggtggcggtggaaggcgtcgatcagctggaaacctatttcggcgcgtatctgccgcagtttttctatgccatgctggcgccgctcacactgtttatcgtactgtgttttgtgaatgtcgcggcggcggtagtgctgcttatctgcgtgccgctgatccctgtagccattgcggcggtgcagacctgggccaaaaaactgctctctaaatactggggacagtatacggaattgggcgacactttccttgaaaatttgcaggggctcaccactctcaaaatctatcaggcggatgcgtttaaacagcaggaaatgaacgagcaggcggaaaaattccgaaagatcaccatgaaggtgctgaccatgcagttaaactccatcaccattatggacctgatcgcgtacggcggtgcggcactgggcgtcatcatggcggtgacccagtaccagagcggaggagtttctcttgagggatgtctgctgattatcctgctggcggcggatttctttattcccatgcggcagctgggttcctttttccatattgccatgaacggcatggcggccagcgacaagattttccgactgctggatttagaagaaaccaagccggaaatcaccgaaagctttccttcgggacacaccatccgctgttccggtctctccttctcctatgagccggaccgggagatcctccatagcgttgatcttaccttcccgcagggcagctttacggcgctggtgggagaaagcggctgcggtaaatccacactggcttcgatcctgatgggaagaaacaaaggatataccggaagcgtttcgatgggcggcgtgcccctttcctccattcaggaagaaagccttctgcgaaacatcacctatatcagccaccaaagctacctgttcaagggcacggtgcgggagaacctgcttatgggaaaacccggcgcttccgatgaagaactgtgggcagtgctttcccgggtaaacctcgcagaatttttaaaagcggaacaggggctggatacccggcttttggaaaaagcgtccaatctttcgggcgggcagtgccagcggctggcgcttgcaagggcgcttttgcatgacagccctgtctatatttttgatgaagccacctccaacatcgatgtggagagcgaaaacgatattatgcgtgaaattcatgaactggcaaaaagcaaaacggtaatcctcgtttcccaccggcttgccaatgtagtgggcgccgaccatatttatgtgctggatcacggaatcgttgcggaaagcggttcacatgaggaattacttgcccaccacggcctgtatgaacggctgtggagtgcccagcagacattagagcaatttggaaaggagcgtgcaagcgtatgaaaaagcgaagcggatttgctgtgatggcacggctgatcgggctggtaaaacctctgagcggctatatgtcactggctgttttgatggggctcgtcgggcatttgtgcgccgcctttatcaccattttcggcggatacggtgtgctggcagcccttcggtttgaagtaccttttactctgacaacggtttttatttccgttcttgtcttcgcccttctccggggatttttgcggtatgcggagcaggcgtgcaaccactttatcgcatttaaattactggcacttttgcgcgaccgggtgttccgcgcactgagaaagctctgcccggcaaagctggaaggccgggacaagggggatctgatctcggtgatcacctccgatattgaactgctggaggtgttttatgctcacaccatctcaccggctgccatcgcgctgttgtttaccattgtcatgtgcctgttcatcggctcgtttcactggatcctgggcgtgattgcgctggcggcctatctgatcgtgggaatcgtgattccaattgtgatatccagatgcagcggggatgacggactgcgtttccgcaccagatccggtgagctttcgggctttgtgctggacagcctgcgggggctttccgaaatcctccagtatggacagggaaaaaagcgcctttccaaaatgaatgaaaagacggatgaactctcccgagacgaagaaaagatgaaacgcactgccgggcgaaatacagcggttaccaatacggtggtgttaacatttgatcttatcatgctatttgcttcggccttgctgtaccaaagcggcgcagtggattttgacggcgttttgatccctacgctggcgctgttttcttcctttggtcccgtgattgctctggcggcgttgggcagcaccctgcagaacacctttgcggcaggcaatcgagtactggatattctggacgaaacgccggtagtagaggaaatcaccgggaaaccggaaatcacattctccggcgcaaaagcggagcaggtttccttctcttacgggaatgaaaccattctttcggatgtatcggtgacaattccggaaaatgcggtagtaggaattgtgggcagaagcggaagcggaaaatccaccctgttaaagcttctgatgcggttctggaaggtgcaggaaggcagcgtggagctttctggccgatcggtggaagagatcaacaccaaaaatctgcgcgatctggagagctttgtgacgcaggagacccagctcttccacgacagcatcaaaaacaacctgcggatcgccaagctgaccgccaccgacgaagagattgaaaccgcctgcaaaaaggcctccgttcacgattttattatgacccttcccaaaggctacgacacgccggtgggcgaactcggcgatactctttccggcggcgaacggcaacgtctggggctcgcaagagcatttttacacgacgcacccttcctgctgttggatgaaccaaccagcaatctggacagcttaaacgaagcggtgatcttaaaatccctgcgggaagaacgggcgggcaaaaccgtggtgctggtttcccaccggcagtctaccatgcgcatcgctgataccgtctattcggtggaacacgggaggatgagctgatgaaaagtacagccgataagcgggaacgggaaaagcggatggtatcggaaatgattgccctgtactgccgcaaaaaacaccacaccaaaggcggactttgtcccgaatgtgcagatctggaagcctatgccaggatgagaagcgacaagtgtccgtttatggagacgaaaaccttctgttccaactgtaaggtacattgctacaaaccggtcatgcgggagaaaatccgggaagtcatgcgtttttccgggcccagaatgctgttttcccatcctgtgatggcggtttcccatgtgatcgaatcgaaaaaagagaaaaaacgactggaggaatcaaggtgaaaataaagaagcttttatatgtgattttaggctgtatcggtttggctctcggagccgtgggggctgtattgccgcttcttccggcgtttccgtttttgcttttggcggcgttttgctttgccaaaagctctgaaaaactgcaccgttggtttacgggaacaaagctgtataaaaacaatctggaaagctatgtaaaaggacagggcatgacgtggaagaccaaaatccggattatgattaccgtgacggttctaatgtcgatcggctttattatgatgcatgctgttccggtgggaaggatcgttctggcttgtgtttgggtattccatatcctttactttgttttccgggtaaagaccattaaacaaaccaatggtaatcgctaacatatgaaatgacttatcctgaaggaggttaagaaaggaaagcaaaatacaactcctccaattaggggagttgtaccgtgtttcatttagagatatcgggtatatataatttatgtgcagtaagcgcttttgtctacggacaattgcgctttttttattttccattgagtaggttctggctgagaattcacagcggcagagcgccgcccccgacaatctgaatttaaaaaatttcagattgatcggaggaaataacgatggcttacaacaaagccaaagcggaaaaagaatggctccgctggaaagaagtagaagaaaagaaactcagagaactcggtgtggatgaggaaaccatccaacgcctgcatacatacgattgggctcagtttaataaggaacgccagtatctgcagcgacaggtggattggtctccctatgtggattgggtttcagcacaggatctggaactacccgttgaggataccgaatccttgctggatagtatcgaggacatggaacttttttctttgttacatactgtggacaagcttaccctcgaaattctctttatgaaaatggatggatatagcagcaaagaaatagcgtctgcttttggaatggatgagtacgctgtaaatatgcgaatttaccgcctacgaaaaaaaataaaaaaatatttatgacctgcgttatattccgcctcttttcatgggctatggggcgaacggggaaaaagaaacgttcgccttgtagcttgaaaagtgaataccagccatgcgggtacattcccgcctaagtgagcgacgcaggaaaaagcgccatgacgagccgcacacaaaccgcctcccatttattcgtgggacggtggccccagttgttggttttgagcgatgcattttgaccgaaaagagggtgtagtttcccttttcgccacgaccttgggcggggtattatgatacgcattatcgtttgcccacacgtcagatgggttggtcgaccttgggttgtaatcagcaagacctttggggagccagtgaacggtttgtaaactgcaagcctgcccgtatggttcccaaggttgccggggggcgagcagcaaatacggcacatcaaaatcaaaccttttaatttttcagattgccgttgacggcgaatccgtgcggcgcagtttaaaagctgcgccgcattagtttgccgccaacacatacgagcaaactgctcaaaggagaatgtgccgaaatgaataagcctactttgaaagagcaggcccacggagagattgaaaagattttcagaattcttttgcctcaaaatggtttgtcggttcgggaagaacaaatcaccctctgtcacgccatgctggataccctgctcaaaaacaatatcgctctgtgcgacgcaggcgttgggatcggcaaaacctatgcttacctgaccgcctgcattttactgaaaaagtttgccccgcatggacctgcaggttctcagccggtggtgatttctacctccagcgttgccttacaggactctatcatcgaagaatacattccgtttttatcccggatttttctggagaaccgtgttatctccaaacccatccgggcaatcgtaagaaaaggaaaagagcgttttgtctgtgacgcccggctttctcaaagattggaagcggtcaaagataagaataagaatgcaaaacagctcaaagcattgctttcccttcgtacttattatgatttggactccgtaaccggccttagtggatttgaccgtcggcaggtgtgcgtccccaaagtttgcgagaaaacttgccctttgcgaagcgcctgccggtatcatcaatacctgaaggaagccagaagcgcggagattttcgtccagatctgtaatcacaattacttgttggcagacgccgcccatcgtttgcaggaacttcgtcctcttctgaatgactatcgggctttggtaatcgatgaagctcacaaactgccggacgcagctcggcagatgtatgggaaaagcctttcagcagaagatttcagcgagctctgcactctgctggcaaaagaaaaatatgccctcgcagcccagcggctgaaagaaaagtttactgctcttatgggagccatgtgccggggcgaactgctagaagaagcacagcgtactgcctttgttttaacgccggatcgggaagctgcccttcgggattgtctctcccttcttcggcagatccaaaaacagctagcacttcacctcccacggtggatactttaccagctgggaacaacagagcaaactctcaacctgttttttaccggcgaccgtaaatacattctttatattcagtatgacagggatggaagccccagcctgtgcgccgccacccgggaaatgccggaacagctgcgccacgcactgtggtcgaaggaaacaccagcgattctgacatccggtacccttatggccgggggcagctttgacagaacccgccaactcatggggctgtccgcaaacaatcggctggatgattttattgcggtttctccttttgattatcaagaaaactgccttctctacattcccgatgatatgccaaaggcgcaaatgggcagcgaaaaagaagccaagtgtctgtcagagcagatctgccgcttagtggaaaccactcatggccacactctggtgctgtttacttcctactccctgatgggcgctgtttataaccaagtaaaagagcatctgtcctttccgctaatggtggtatggcggcattcgcaggatattatccatcagttcaagcagacgcagaatgcggtgctgttcgcagcgggttcctgttgggaaggtgtggactttcccggcgatatggtatcgtcgctcatcattgtacgcctgccttttcctgttcctgatcctatcagcgaagcggaacgggagcagtatcccaccctgcaggactatatccgagaagtcatcatcccagatatgcaggtaaaactccggcaagggtttggacgggctatccgtactgaaacagatacctgtgtggtgagcattctggaccatcgtgcagcacccgaagaacgatatcaccgagctgtgctggaaaccctgccaccacttcatatcgccagaaaaatcgaagatgtagaagatttcatccggaccaagaaaagcccggattattttatgccgtaaaggagaacctcctatgaatcaaaaatatttacagggactttccagcaatatggaaagtccaaacgaagctgtcttttttgaagcgactcccgaaaatatcacagcatttttaatgcagcaccaatgggcacaaatgtctgccattggaactgtggacgaccgatcttttttaactgcaagaatgggacttattgacacttgccctgatcaggcatatttattgcaaaagctccttcccatttatgccaaggttcagatgggtgacattcctgttccgaaattaaaaaccgtccccaaagaaatagcccttgccgaaaaatgtcccaagccggactggaactatttgcgctgggaaggatacagcgataagaaatatcaggatattctcagcggaaaggctcttttggaaatgtcttggatgggagaaaaaacatccttggaactacaagtgcgctcttattacagcggcggaaatttggctctgctgttagtggattggagtcaaggcgatccgcagccatggggagatctgagcgtaaatttgggaaaatccattgcaaaggactgtgcttttattgacgtcaacaatttgagtaatgacattctttcatggatagagaaaaacggactgggttctcccacaggccgaaatgagcaaagcggatttgtagtttatccagaatatcgctttcatccagaacgcctgaaagaactggatgataagggatatgccgagtatgaaaaccttctgaaacagcagcaacaacacatgaaaaaaggctgggacagatgagagcagttgcattgcatttttaccaataaggagattgatatagatgaatgagaaaacggaaccagaaaaggaatatccttatatagaccgtcctatgtggttatacagccgaagcagcgataagaaaatattggctctcatgcagcagatgcacgagttgttggaggaagcccagcgccgcagttacacggttgtaggcacttcacaggatatggggactggcagaagcatggctcggatgggattacaacaaatgatgcgctctgtgaaagaaggtcatgtccgtgctgtgcttgttcgggatttaacccgcctgagccacgatcccgccgtcctaattcaaatactggaatttttgcaggaccacgatacggtactaattaccactgacagcgatcttcggtatgaactctatctaaaagggctggaaaatcgcttttttcaaagagcagctcgaaagagtctccctctgccgtggtaaagggggtatatcatgaacactacatacaatcctcaagaaccttccgctgtcctcatcaacgaaatcaagtattatatggccttctccgctttaaaaaaactttttttgaaaggacttatcaccaaagaaaactgcgacaaagccaatgttgctattgccgaaaagtacggtgttttagaatactatatttagtggttgttgtgatagctttatcctctttcttgtggtagtgttgtccttgccaaaggtgaccgacgttactgtcacatgacactactgcaggaaagggggcatagaaatgccagaaattcgagtgattgaaccaataatttttgcaccagccgaaaagcttcgagtatgtgcctatgcccgtgttagcagtgattccactgatcaacgcaattcctttgcttcgcaggtcaactattatacaaagtacattcaagcacatgagggctggacctttgttgacatatatgcggatcaaggaataacaggaacaagtgcgctgaagcgcgatgagtttctccgtcttatgcgtgattgccgacaaggaaaaattgatcgaattctggtcaaatcggtttccagatttgcacgtaacgctcaggactgcattgaagctgtgagagagcttcgccagctgggagttacggtttattttgaaaaagaacatatcaataccgcaaacatgagcaatgaaatgtttctaagcatgatgagtgcatttgcgcaggaagaatccatttccatatcgaagaatatgcgaaaaggcgcagtcatgcgaatgaaaaacggaacatttcgattgtcacaagcgccttatggatactatctggatgagaaagggatactcattgtacaacaggaagaatctaaaattgttcaaagaatatttggcaacttcctctccggaatgggaatacaggaaatcgctgcagaactgcaaaaagaacatattccaaagttaaatggagaacccatttggagttatacaggtattctctatatccttacaaacgaacgatacataggcgatgaactgtttcaaaaacgatacacaacagatactctgccttttcaaaaaaagataaatcgtggacagaaaaagcagtattacgccgaagatacccacgatccaattatcagcagagaggtattccgaaaagcacaagaattattaaaacggaaatcagagcgacatggacatcaaaataatggacagtatacttttacaagtttaatcgtctgtgatgagtgcgggacaaatttctgtagacgaattgcgaaaaaccaacgtgttttgtggacctgtcgcaagcattttaaagggaaacatctgtgcagcatggagagcctaaatgaaactgaaatacagcagtgcttccttactttatataaaaagctggctgaaaatcgtcaagaaatccttggaagctatctccgccagcttgaagaactaaaagataaggattttatggcccatcctgatgccatggaattaaatagacagattgctggattattagagcagaatcacactctacaccgcttgcgggcaaaagagtgcattgattctgctttttttatagcacaatccaatgaattgagccaaaagatatccaatttaaaagccgaacttaaacaatatcgtgatttaaacgagtatgcggattttattgataacacccgcctgattttaacgatattagactccccgatgccggtttttagctcatcagtgttccgaaatatagtgagccgtattacagtgacacatgaaacattgagatttcaacttgtcaatggattggagttggaagaagaaaggataagcggaggttaatcatgaagaaaaaaagatacttgccttttggatatcagatgaatgaaggaaatattataccggacatactggaatcttctgctgtgcagtcaatttttgaaaattatcgaaacggcgcatcgctgcagatgcttgctaaacaaatgcagcaatctggtttaaagtaccgagaaaatgcggtttggaataaggcgatgatcgccagaatattagactgcgaaaaatatatttcagaagaatttcctgcaatattaccctctgacttatttctacaggttcaaagactaagaaaagacagagctcaaatttatggtggaagtctgaatccagccttgcgaggaatacgagatcttatctgctgccagacctgcggacagaagcttgttcgaatcaatcatcgagataatgtatatatcatctggaaatgcccttcctgcaatacggaaacaaggtatttgcccgacatagagttgatgtcaagtgttttatccgcaatcaatagggcaattgaagatccacagaaagttatgaattttaaaaagaatgccaattgcctgtcagttcaagccgttaggttagaaaacgagatttatcgagaacttggtaatcccaagtccaattcaaaaagattattggaaatcatcaaacaatgcgcacaggaaaaatacaaagcctgtcatgccaatggtgattcagaagaaacggaatgtttgatagcagaactgaaaaaactgcagccgatggaacactttcaatctcaaatactacggaaatttatttgtaaaattttgataacaccagcaggtgctgttacaatacaactcaaaaatggggcgattatttaagtaaggaaaggagaaaccataatgccacagaaaaagactaaagtgattagggaaattcccgaaaatccctttattcaaggacaggccaaaaggaaaaagctacgagtagccgcctactgccgagttagtacagagcaggaagaacaagagagtagctttgaaaatcaggttgcctattacacagatcttattcagagcaatccggaatgggaatttgccggaatttttgcggatcgtggaatcagcggcactaaggataccattcgtccagagtttatgaaaatgatcgagcattgccaaagacataaaattgacttgattttcactaaatcacttagccggttttctcgaaacacgttggattctatcaaatacatacggctgctgaaaagcttgaatgtaaccatagaatttgaaaaagaaggactcaatacaagtgatgtcagcagcgaaatttatttgacatggtttagcgccttcgctcaagcagaaagcgagtccatcagtcaaaatgttaccatgggaaaacgcaggcagtataaggaaggccattttgccttcaggtacaaaaactttttaggctatcgaccgggagaaaatggagagcctgaaattgatcctgaacaagctaccattgtttcacggatttttttcgcatttctcagtggagataccccggaacaaattgcaaaatctctggaagctgaccacatcccatcgccaacaggaaagccaacatggtcaaaaactaccattcgaaatatgctgcaaaatgaaaaatacgctggagatgtgctgctgcaaaaaacctatactgcagatttcctcgaaaagaaggtgaagaaaaatagaggtgaggtcaaacagtattacattactgacaatcacccagctattatcccaagagatatttttcaggaagtccagttagagattgcaaggcgcagtagcaaaagaaaggtttcttgccggaggacaaagtctggtcgaggaaaatataccagcaaatatgcactatcggaaagaaccgtttgtggggaatgtggtgctatgtatcgtagaaccatgtggatcaaacgggacagaacgaaggaagatgtatggcgatgcgtgaaccgacttgaatttggcaccaagtattgcaaacattccccaagtttaaaggaacccattttacaccaagcaattctgaactgcattcagtccgtatttcataataaagaagaaatagcagaagcagttcgtgaagcacagaaaaaaatcattttatttgaagatgccaaaaataatccagaagtgatccgtcaaagaatgcaagacattgatcacggaatggcgaatcttttaactttggcagcccaaagttcccaaatagaactatttgaaaaaaagttcaaggagatgactgaggaaaaggctcggttgacagagcagctaaaacaagccgaagaagatgcaacaaccgatgcaaagcgtcaaaagcaacttgatgatattctaaaggcaattgacatcgatatcgttgagttaacagaatttgatgacacgtttatcagaagaattgtagaacaagtaactatcctttcaaaagacaagatagaagtccggttcataggaggattttcaaaagttggtgatattccgacaaaataattgtcgacagaaaaaagccgatcattacttcatcattattgatggaataatggtcggcttttttgtgtttgcaaacattccatggggttgaaaaaactcctttattctattataataatcaacatcaagaaaaacgcttcggtggttcgaaaaagggtatcagattttcaaaaaaattttttgaaacacaccggaaaccgcatggttactgggtgccagtaatttcggtcaccaaagacagaaaaaaggactttgcattttgcaaagtccttttttctgtgaaataaatcccttcgggatttgtgaaatataccttcggtatgtgaaattgccctacgggcagtgaaatgcgctgcgcgcgttaagggcgaatttcatttcactttctgcgtaagtagaaaatttcacaatgcgtaagcattatttcacattttgcgtcagctgcgggtctttgtcaccgtggtaggtattttgcacagtgcccttgtaattttgtagaaatccgattataatataatcggaaatttactattttagggggagtttaccatgatttttgaaaatatggatcgcattatttttgcaggggattccgtaacggatatgggcagcgcacagccggtgggcgagggcttgtttgacaacatgggtcacggctatccgcgcgtcatcgagagccttgtgacggcgacttacccggagctgagcattcgttttacgaactccggcatcagcggcaatacgtcgaaagatctgcttgcgcgctatgagcgcgatgtgctttccttgaacccgcagtgggtgtctatctgcatcggcatcaatgatgtgtggcggcagtttgattctccggcgctcaccgaccaagcggttgacccggtggaatatgaagaaaacctgcgcacgatgattgagcaggcgaaaatggttgcgaagggcgttatcgtctgcacgccgtactacatggagccgaacaagagcgactttatgcgtgccagaatgcaggaatatgtggacatctgcgagcgccttgccgaggaatacggctgccgttttgtgaacttccaagcggtgtatgacaagtttttgcagtataaacactcctcgctcatcgcatgggaccgcgtgcacccgaaccagatcggcgcgacgctgatggcaaaggaatggctctcgaagtgcgggtttgaatacgaccacacgccggaggcgtaagatcccattataatctgggggagttgaaagcatgaaatttggtgtgcagctttacggcccgctcaacaacatgcagggcgaggttttggagaagctttctgcgttggcaaaggccggtattacagaaattgaaccctgcatgacgatggggccaatcctcggcccggagggcgtgatctggcccgcagactggctgcttgcacatgtcgaagaaattcgggatatgggcctgcggattgtatcaatccatgtttttgcggagaatttggtacagtctatggataagctgaaggcgattgcggagaagaccgggctgaagcagtttgtggtgaaaacgccggagaacagtgcggaaagcatcttgcagcagacggcgctgaactacatgaaagcggcggatatgctggagacgttcggcgttcggttgctgctgcacaatgaagccggggatattcagacgaaaatcgcgggcaagacggcgtatgaacacttgcttgacctttgcatgggcaaggtgggcgcacaggtggacgtgggctgggtgcagtttggcggagaagacccggtcgcatttttggagcgcaacgcggcgcgggtgcagtccgtgcaccacaaggatttcggtgcgggccgcgagccgattgacgtgccggtgggcacgggcaacgtagaccttgccgcgtgcttccgttttgcccagagtcgggacattccgcagcttgtcgaccaggagcactttggctccgatgtgccgggcgagcttcaaaaagtttgtcagatgctgaacgggtttgcccaaaaccgaaaagacacggtgagctttttgaatgtttacgacgtaaagaccggcgtggtgcacacagtggcaagttttgaccgcgtgattgaagcgccgaactggctgaaaaacagcgataccattctttataacgccgaggggcacatgtatgcctatgacctcaacacgaacatggaacggctgctcgacaccggcagctgcgaccaatgcaacaacgaccatgtggtctccccggacgaaacggagcttgcggtcagtcacatgacgtttgacaacggagactttacctcccgtgtttatatcgtgccgatgaaaggcggtgagcctcgtctggtgacgccgaacagcccgagttttttgcacggttggtcgccggacagcacggaggtggcctactgcgctttccgcgacatcgacggcaggcaggaagtggacgtgtacacgatcccggtgaacggcggcgcggaaaagcgactgacaaagggtggctttaacgacggcccggagtattccccggacggaaagtacatttggtataacgctacaaactccggcttgatgcaggtttggcgcatggagcgggacggcggcgagcagacgcagatcaccgaaaaccggcggaacaactggttcccgcatgtatctccggacggaaaacgggtggtctatatttcctacggcccggagcagctggagccgcacgagcacctgccgaacatgccggtggagctgtggctgatggatgcggacggcgaaaatcagcacaagatcctgtcgctgtttggcgggcagggttcgattaacgtgaactcctgggccggagacagcatgcggtttgcatttgtgagctacgcgattttggaagacccgaaatgactgacgaggtgaataaaaatgatttttgaaaataaaggcaaagagaataccttggagacgctgcacattgctttaaacgccgcaaaggagcgcggaacgacgcttgtggtggcttcgagcgcgggcgacacgcttatagaactcatcaaaatgcaggaagagctcgggacaaatgtgccgatggtcatggtggggcaggcgtacggctacccgaagcagggcgtgaacaccatgacggacgagcggcgcgcggagttgaccgcagccggtgtacatattattcatgccgcgcatgccttgagcggtgcggaacgcggcatcagtcgtaaattcagcggcgcgtacccggtggagatcatggcgcacacgctgcgcatgttcggacagggcacgaaggtttgcgtggagatcgccatgatggcgctggataacggcgcgattgagcttaataagccggttgtctgtgtgggcggctcggcgcgtggtgcggacaccgcgtgcattatcacgccggcgtatacggcggactgccttgacacgaaaattcacgagattctctgcaagccgggtttgtattgaattataaagcaatgacaaaagctctgcgcctgaaattcggtgcagagctttttgctgtcttacattatcgtttgccgcgctttttgggcggctcgcctgtccaacggcggctttggggcgctggcggttgactcgttctgccgtgctttgcgccgtttttgtttttaccgtcaaacggtttattgctgtttgcggcgggctttgggggagcaaaacgggtatcaccgtggcgggggcgcaagaggcagtttttgcctgtgccaatgaggtcgcggcgattcgctttgatgagcgcttctgtgacgaggtcgtaatttttcggatcacggtactggatgagcgcgcgctgcatcgctttttcgtgcgggtcgcgcgcgacgtatacaggcttcattgtgcgcgggtcgagccccgtgtagtacatgcaggtcgagatcgtggacggggtggggtagaagtcctgcacctgctccggcatatagccgaggtcgcgcagatattccgcgagctttatggcgtcctgtaaggtggagccgggatgcgaggacatgaggtacggcacgaggtactggttgaggtgcatttctttgttcagctctttgtagcgcttgacgaagcggcgatagacagagttctgcggcttacccatcatgcgcagcacgccgtcggaaatatgctccggtgcgactttgagctggccgctgacgtggtatttaacaagctcgcggaagaacgtttcgtctttgtcattgatgaggtaatcgaaccgaatgccggagcgcacaaagacctttttcactttgggcaatgcgcgcagcttgcgcaggagggaaacgtaatccgtgtggtcgatctccatgttggggcatggctccgggaacagacattggcggtttttacacacgccgaccttcatctgctttttgcaggcaggcttgcggaagtttgccgtggggccgccgacgtcgtgaatgtagcctttaaaatcgggatcctcggtcatttttttcgcttcttccaaaagcgattcgtggctgcgggactgaatgatgcggccctgatggaacgtcagcgcgcagaagctgcatgcgccgaagcacccgcggcagctggcaagactgaatttcacttcttcaatggcggggatgccgccgagggcttcgtaatccgggtgataggtgcgcgtatagggcagggcgtaggtgtcatccatttcttcggtcgaaagcggcatctgcggaggattctgcacgacgaacaggtgatcgtccgggtagggctcgacgagcgttttcgccgtgaacgggtcggtgttgagatactgattgtaaaagcttttcgcgtacagctctttactggtggaaatcttatcgaagccggggaggtggagcacgtcgtcgccgtcgggcgcgatgtgcgttttatacacggtaccgcgaatgaacgtgagctcctgcacggggatgccgctgcgcagggcttcggcaatctcgacgatggagcgctcgcccatgccataggaaatgatatccgcgccggaatcgaggaggacagagcgcttcattttgtccgaccagtaatcataatgcgcaaggcggcgcaggctggcctcgatgccgccgatgacgatgggcgttttcttaaacgtgcggcggatgaggttggaatatacgatgacggcgtaatccgggcgcaggcccattttgccgccgggggagaaaaagtcgctgcggcggcgctttttggcgacggaatagtggtttaccatggaatccatattgccggcggaaacgagaaagccaagttttggctcgccgagtgtgcacacgctttcggggtcgcgccagttcggctgtgcgataatgccgaccgtgaaaccgtttgcttcgagaatgcgggagatgatcgccgtgccgaacgacgggtggtcgacgtaggcatcgccgctgatgtacacgaaatcgagctgttcgatgccgcgtaccgccatatcttcttttgaaacaggcaaaaaagccgttctgtctaatttgttcatgaaaagtccttaagaatttatacgttgccggtcagaatgccgcacggctctgtccagtcaaagtgtttcgtttcctcgccgagcttccacacggcggggcaggtggtctcgtgccaatcgagcgggtgcgcggtgggctggggctgacttgcgcggcggaaagcgtcgcggatgatggctttgcgctcgccgtttaaataggaagccggaacggagagcagcgtgggtgtgccgctttttgccacaagctccagccagcgcatgccgagcgtttcgtcgatggcatcggtgagcggtacgcagtcggcatcaatggcgaagaagcggtcgtgcatcggcgcggtgaatgccaatgtgttcatgcccatgcggcgcgtacgtgcccagagcttgccgctgacgtcatcgccggtgcggttgaggtgcatgagcccggcgccgaggtggccgaagcagttgcagcccatgaccatggcgtcacccgcggcagctaagatgcgtttatataattcaattaaaatttcggccgtcgtgcgggtctcgtccgcaaagcgccaaccgctgtccgtaagctcgtcgcccatttcaaagccccaacggccgagtacgtcgtaggaagtgaaatcgtgcttgatgagcttgtaaccccagcttgagacggtgcggatgtcctctgcgatgtggtcgagcacttcgggcacggaggggtcgaggtattcggggtcacgcttcgagcgccaagaggcgggaatactttcgctgtgatcccataataaacgtacccagatgcccggctgtatgccggattcgcgcagctttttggcgaggtccggcatgtccggaaagcccttgttgcccgcgcgccacgggccgccgttgtagttatccgcacggtcgatttgccagcagtcgtcgatgatgaaccacgggcggtttgcgagcccctcggtgagttcggcgagggccttcgcttcgcgcagaacgtcatcttccgtggcatgcccgtaggcatggtaccagttattcgcgccgtagacgggggatttcggcagaatggggttcgggctcaaaacggagaaaaattcacccatggcagtaaagccgtcggcgtcttcgtattctgcacggcaaagctccgcagcgcagagggtgcggccgtttaagcgcacgccgagaccgccgcagcgcacgtcgagatatacgctgtacccggtgctttcggctgtccaccagcacatggcagcgggctgcgtgtgcacgccgaaggcttcggtcttgttgccgctctgcaggaagaagtaccacggcatgacgcgatgggggacataaccgcgccattcatagtcgccgtagccgcgctcccaaacaccgcttaaaacctgcgctttttcgggcagcgggtccgcgaaatagagcgtgacgcgctgcacgggcgttgtgccagcggtgatgtatacgcgcagagcttcgccgttcggctttaactcgacggtgatgtctttataggtagttggattttgaaacggaaggaatttttcttcgtcgtcggtttttaagagcatgccggtgggcatggggaatttttttggattcataggggtgctccttcggtcatggatgcttttttatagtataacacaggatatgcaaaaaggaaagtgatgaaattccgtgaaagctgtacgaaaaattcgtttgattttcttccttgtcaacagtgcaaaggtgtgctatgctttaacatgtacgcacaactgagttttgtatcgattgacagtttcaatggagaggacaatgaaaatggaagaaaaatttaaagacagtgcgctttccccgaaagagcgtgcggaagacctgctgccgcgcctgacgctgcgcgaaaaggtcggtcaggtgaatcagaagctttacggctttcagagctacacctgcaacggcgagcacgtggagcttgcggacagctttaaagaagaagtggaaaaatggggcggcctcggtgtgctttacggcttataccgcgcagacccgtgggcgaataaggattatacaaccggccttaccggcgtgaacgcaatccgcgcctataatctggcgcagcactatgtactggagcactctcgcttcggcattccgatgctgatgagcagcgagtgcccgcacggccaccaggcgctcgacggctatttgctgccggtgaacctcggcatgggcgcggcgtggaacccgaagctcgttgaagagggctttaaggtcgttggcgaacagcaaaaagaaatgggcgtggattttgcgctcgtttccatgctggacattctgcgtgacccgcgctggggcagaagcgaagagtgctacggcgaagatccgtacctctgcggccagaacgctgctgcggcggtgaagggctgtgcgagcgccggtttggaggttgttgcgaagcacttctgcgcacagggcgaaacgaccggcggcgtaaacgccagtgcggcgcgcatcggcgagcgcgagctgcgcgaaattcatctgcccgcgatgaaggaggccgtgaaagcaggcgcgacgggtgtgatggcagcatataatgagattgacggtgtgccgtgccatgcgaatgagtggcttttaaaggacgtgctgcgcgaggggcttggttttgacggcatcgtgatggcggacggcgtagcgattgaccgtctcgatatgctgacgggtaacgacaaggcggcaaacggcgcgtatgctttaaatgcaggcgtggacgtgagcctgtgggacgacagcttcccgcacctggaagaagccgtggagcgcgggctcgtttccgaagaaacgctcgacaaggcggttctgcgcgtgctggagctgaaatttgcgcgcgggttgtttgagcacccgtaccttgaagaaaaaccgctgacggaatacaatgtgccgaaaatgtttccgcagagccttgaaattgcgcggcagtcggcagtgctgctcaaaaacaacggcgttctgccgctgaaaaaagagaagaagctgcgtattgcggtcattggcccgaacgcggacgcgctgtatcagcagcttggcgactacacaccgccgctgcgtgacggtgtgggtgtgacgatgcttgacggcattcggaacgaatttaagaacgccgatgtacgctatgcgctcggctgcacgatctgcgacgacgatacttccggtattgcggaggcggagaagcttgcggaggagagcgacctcgtcattttggcgctgggcggttcttcaagccgctttgcgggcgcggagtttgacacgaacggcgcggcaatcgtcggtacgaaattgcagatggattgcggcgagggcgtggatacctctgatgtgcgtctgccgggcgcgcagaacgagctggcaaatgccgtgtttgaaagcggcaagccggtcgtgacggtgctcatttccggccgcccgcatgctatccccgagatcgcggaaaagagcgatgcggtgctgtggtcgttctatccgggcccgtggggcggcacggccattgcggaagttttgagcggcgcggcagatccgtgcggctgcctgccggtttctgtgccgcgcacaacgggacaactgccggtgtactacaacgcccgcgcttcctacgatgtgatgcgttaccgcgatttggagaacacgccgctgtacccgttcggcttcggtttgcactacacgacgttcaagacgaccgtaaaggacggcacgccggaaatttctattgcggcacttgaaaacggaaaagcgcataccgtgacgtgcgaggtggaaaacaccggcagcacggcgggccatgcgacggtgcagctgtacattcggggcgtgagcggcacaatcgtccgccgcgtgcgcgagctgaaagcgtttgagaaggtgtatctccagcccggcgaaaagaagacggtagaactgaagcttgaccgcgacgcgctgagcatctggaaccgcaaaatgcagtttgcgccggaagagagtaaagtggagctttacgttgaggaaagcggcagcaaggtctggaacggcgagctgaaaattacgaagtaaacgaataaaacaaaagcaccgtgcctcacaaggacacggtgcttcgtttatttatgctttaagagaaattatttgtgcgctttcatatattcgagatttttctcgatgagggcacagcgctggcggacgcagtctgcggaacgcagcgggtcggccggggtgccgaacgcatagtcgagcagctgtgcaatgctcgtctccgcgacgtgcatgcgtgtatcggaggaagcgtagtagacgtagaccttgccgtcgtcatcagcgatggcaccgttcgtaaacacgacattggaaacatcgccgacgcgctctttgcccagcggggcgatgaagaagccgcccggttctgcgatgagctttgcagggtcctgcaggtcggtcacgaagacatacagcacatagcgcaggccggctgcggtgttgcgcacgccgtgtgcaaggtggatccagcccttttcggtcttgatcggcacagcgccggcgccgtttttggactcggtgatggtgtggtagcggcgcggactgacgactttttcttcgtcgatgacagcgtttgtgatgtcgtcgcatagaccgaagctgacgccgccctggtcgccggcttcaatgaagctgtcctgtgggcgggtgtagaacgcatacttgccgttgacgaattccgggtgcagcacgcagttgcgctgctggggagatttcgtcttgaggtccggcaggcgctcccagttgacgagatcctttgtgcggacaatgccggcagcggcgaatgcggcggagaggtcgttcacggtcttatccttgctttcgctgcagaacacgccgtagatatagccgtcttcgtgttgcgtcaaacgcatatcgtagacgttcgtttcctcgggggaagtgtctggcaggatgaccgggtaatcatcaaagcggaagccctgcacagggttattgctgcgcgcgacggcgaagaaggactttctgtcattgccttctacgcgggcgacgaggcagtactgaccgttcagcttgatggcaccggagttcatgacggcgttcacgccgagacgctcaagacccagcggatttgtctcctcgttcaggtcaaatttccagaacggcggaatgtggtcgcgggtgaggacaggattctcgtaacgcgtgtaaatgccgttgtaaaaagcggcaggcttgttctcttttgcgatgagcgcttcgtaatcgtgaaacgccttttcaatgttcgggttcatgtttgtacctccatacagaatattacaagcatactataccacgcgacgtgcattcggtcaaacggtataggttgcctgttattgcaaaaaggttgtttagcggatatccttgtactcggatttttctgcgcggcgctgctggatgtaggtgatgagctcaaagagaccgtctgctaaaatgctgatgccgaagaacatgatggcggcttttgcggcacggaacggatttacgagcagcacgatgccgagaatgagcggcagtacggcggagatgagtacccagaagcggtaggggctgtacaccgagagggcgtcaacggcgagcggcatttttccgatgccgtctacaagcagcatgatgccgagcgcgatgggcaggaaagagaggacgacgtacgggcgggaaaagcagaaaataccgaacgcaaggcagagaatgccgatgacgagcgtgccgcctgcagtgaagccgaggtttctggcttttataaaataccagaagctatgtgcggcgtacaaaatgagtgcagcggcgatgccccagcaaaagacggtgccggacatgcccggccaaaacgtgagcacaaggccgagcgccatgtaaaggacggacgcccaaagagacgtggtgcggaagaaaatgtttttcatagagataagtcctttctataatagagtaatggagtgtgtatttctaaaggcggttttgaccgcctttcaagaacccccttgatagggtttcttgcggcgcaacaattcaccggattgttgcgcctattttcctgatcttagttaggcaaaaggtgtttcgacttttgcgaaagtcgactcagggctttgccccgagcccccaccaactttttgaaaaaagttggatcaaaaactttattcgtctcgctttccgtcagcttgtgcgttttagttcaaaatgatttttggagaagtttaaaatgccttcgtcgcgcattttgcccatttctttggaaagtgcgctgcggtctacgctgaggtaatccgcaagctgctggcgattgaacgggattgtgaagctgtcgctgttttcgcggatggcctgaaacgacaggtatgaaatgagtcgcccgcgtatcgttttcggtgcggtgtggaaaatacggcgcgaaagcgacaggtttttctgcgcgctgacgagcagcaggttttcaatcagcttgccgtggtgcctgcagtttacgggacacggggagagaatctgcgcggttttcaaaaacagcacggtgcagttttctgcggcggcgacattgacgagcatcggttcattcggcacacaggcataggtctctgcaaagacctgcccgggaccgactttatcgagaacactgcggttgccgaaaatgtcgtcgctttcaatcgtcacgctgcccgtgagcacgatgccgagcgcgtttgtgtgctcgcccgcgtggcagatgagatcgccctttttatagctgcgcgtttccgcttttaggtgctcgagcaaaacgccgaaatcgcctgcggggatgccccgaaacagaggcgagcgccctaagatgctgtaatccgtaaaatagcctccttttttcaatcttcgttgttataacaacatactttacagcctaatcgtagtatactgtgttcgtaaagtcaagagaaaaccttgtggcttttgcaaaatttaaaaattggaaggaattttgaatatgatccgcaccatcgttcactttgatgaagaaaaatgcaacggctgcggcctgtgcgcgaatgcttgtcaggagggcgccatcggcattgtaaacggtaaggcgaagctgctgcgcgacgattactgcgacggtctcggcaactgcctgcctgcatgtcccacgaacgcaatctcttttgtggagcgcgaagcggcggcgtttgacgaggaagccgtgaaaatggctatggcagagaaagccgcgaagaaagaggcagaggaaatggcagaaaagctcggcacgccgaagtttaccggctgcccgggcagcatggcacgcgctattgagagaaagcccgtaaatacggataaccgtgcggtcagcggcaagattgaatccgagctgcgccagtggccggtgcagatcaaattagcgccgatccgcgccccgtattttgacggcgcgaacctgctgattgcggcggattgcacggcgtatgcgtacggtgattttcaccgcgactttgtgcacaatcgaaaagtgcttatcggctgcccgaagctcgatgagggcgattacaccgaaaagctgacggagatcatccgtcagaacgacatcaagagcctgacaattgtgcgcatgcaggtgccgtgctgcggcggtcttgagcgcgcagcagtgaacgcactgaaggcgagcggcaagttcatcccgtggcaggtgaaggtcatcgcgaccgacggcagtctcgtagaatgaggacgggaaatcaaacgtgggatgcgctgctgggggcgcttgtgggcgttgtccgtgcggagcagaaaaacgcgaagaccgtggaaacggacagagtgctttttgagggctttgccgcgcttgcggaggatgatgaaacggcgttgcagaacatgctggcgtgcgcccacgcggagaaaaatcgcattgcgccggactgtgcgtattgcgccatgccgtgcggcagcacgagcgatttagatttcggcactgtgcgcaacgcgcgggaggctgtgcggaagcagaaatttgccatcaccgaacggttgatcgaaatcgcgccggggatgctttgcaagctcgaaagcggtgagttgggcgaagacgagctttttgtgtttcacaaagccgcgtttgcgctcggcgaagattggagcccggaggagcttgaagagatgcttgaaacgctaaactgaaccgttttgttgcaaggaggaagctgcggctttcctccttgacttttttaacttgatattgtatgatgagcacaaagagggtgagatttgtgaccgattatacattgcagccgattcccggcaagacgctttcgcaccggctgccggagggcacagcgctcgttttagagggcggcggcctgcgtggctattacagttgcggcgtgatggaagcgttcatggaaaaagatctgctgtttccgtatattatcggcgtttcggcgggcgcagcgaacgcgctttcgtacatatcgggccaaccggggcgcagccgagagatcattgaacactatgtcgggaaccccgattatgtgagcacgcgaaatcttttgacaaagcacacgatgttcgactttgattatattttcggcacggtgccggaaaagcacatttttttcgactgggacaagtttcatgagcaggatacgcgctttttgaccggcgcgatgaactgcgcggacggcaagaccgtttggtttgaaaaggatacgctaaaagcgccgtttatggcttcgcgtgcatcgtgctccgtgccgctcatcacgaaaattcagcattatatgggctatgacctcttggatggcggcatcagtgacccgattccaatcgaaaagtcgcttgcagacggcaacacgttccatgtgatcgttttgacgcgcaacaagggctaccaaaaggaaccgtttgggcacacggcgtttttgaaagcggcgtttcgcaagtaccctgctgtggcaggagcgatgcgcacgcggcatgagatttataaccgccagttggcgttgtgtgaaaagcttgaaaaagcgggcagggcggtcatcattcgtccgttaaagccgctcaacgtcagccgcacaaaggcggaggttcccgcgctgctcgccttacatgacgagggactttatgaggggcgcgcggcactcggttcaattgaagaaatgcttagtattaaactctaacaaaaataaaggaggcattttcatgacactttttaaaatggaaaaccgcagaaactttgggttttccgcagaaaatccaacaggcacaaaaggcggcggcacacgcgccaaggactgtgaaaagctaagtccatgcattcaaattcagcccggcgagaccgttacgctgtgtgacacggacggcccgggcatggtgacgcacatgtggttcacgggttacgtgggacactcgtttattctgcgaatctactgggaaaacaatgaacagccgtccgtggaagcaccgttttcggcatttttcggttgcgcgtatgacgagaatttttctgaccgcgacggcaattacccggttttgaactcagctgcgatgctcgtcgcgccggggcgcgggttcaacagctactttgaaatgccgttcagaaaacactgccgtattacaatggaaaatcgcggtgaaaagccagagacgcttttctatatgatttccggatggtatggagagattcccgaaaacagcggctattttcacgcgacatatcggcaggagcaccctgtgcagaagggacgctcgtatgtgatcttggacggcgtgcacggcaagggctgctttgcgggcgtgacgctggcttccggcatgaacgggcacaacacctgctgggtggagggtgaagccaaaatgtacattgacggcgacacatatcccacgatgaactacacgggcacggaggattacttcggcggctcgtatggctttggcaatgacatttacctcaaccgctaccagacgttcagcgggctttatacgggcttgtatgcgattttgggcgacacgaaggaaatgtataaccaccaaaagcgctttatgctgtaccgctggcacgtgaaagacccggtttatttcgatgaggactttaaaatgacgattgataacctcggctggacgggcccgcgctacgacgactacacgtctgtggcatattggtaccagacggagccgaagccggtgccgtttacgctgccggaggacaaagagcttatcatggaataaaaggggtaggcacattgaaaagagttttggtcggcggatttttggcgcttatcggctcgatatggggcgcggcaatctttattgcctgcggcatgaaccttgtaagcggttggtcaacgccgccggggcagtttttctcgactatctccgaggtcggcttgaaccggccgctggtgcttgcggttatcgttacgctcattgggcttgcgattttggtgaaagagtattttacgagagataaaaattaaaaacagcttccgttttgggatttctccaaacggaagctgttttgttttattatagggttactgtgccgttatttgatgcaaagagccggcgcatttcagcgcgcaggccgcgcagggcgggggagctgagttccgggtcgcgctcggtcaattctttggcgcattgctgcgcttcctgcaaaatttgcatgtcgtttaacatgtcggcaatctttaatttcggcaggccgtgctggcgctcgccgaagaaatcgcccggaccgcgcaggcgcaggtcttcgtccgcgaccttgaagccgtccgtggtgctgcaaaagagccttaagcgctgtaatgtttcatcgttttgtgcttccgtcaccagaatgcaggtggaggcgtatttgccgcggccgacgcgcccacgcagctggtgcagctgcgaaaggccgtagcgctcggcgttttcaatcatcatgataacggcattcggcacgtccacgccgacctcgacgaccgtggtggacaataataatttcgtgcgattttctgcaaaatcggtcatgacggcgtccttttccttcggcttcatcttgccgtgcagaatgccgatgggcatgtcaccgaagtaatcgcgcacgatcttttcatacgccgcgatgcttgccgcgtcgctttcgccctcttcgataagcgggcagacgatgtacgcctgtcgtccctcgtcgatgtgctttttgatgtacccgaacgcgcggcggcgctttggcgggtcgatgagatacgtttcgatgggctgacgtcccgggggaagctcgtttagaacggaaacgtcgaggtcgccgtaaatcatcagcgccaaggtgcgggggattggtgtggcgctcatgacaagtgtgtgcgggaagttgcctttttttgcgagcgcggtgcgctgattgacaccgaagcggtgctgctcgtccgtgatgacgagcgcgagggacgagaactccacgccgtcactgatgagtgcgtgcgtgccgacggcaagctgaatctcgccggtcttgagtcccttaatggcttcacgttttgctttggcgcgcatgctgcccgtgatgagcaccgttttgatgccgcagggagcgaggagattggagagggactcgtagtgctgcgccgccagaatttccgtaggagccatgagcgccgcctgaaatccgttttgaatgaccgtgtggcacagcgccgccgccacggccgttttaccgctgccgacatcgccctgaatgaggcggttcatcgggtgcgggccctgcatgtcgcggatgccgtcctgcacggcacgctgctgtgcgccggtcatcgtgaaggggagcagggcggcaaactcttttgtataatcctttttgagcggatacggattttcgcgcacacctgcgcggcggatttccgccatgccgagctgcaagacgagcagttcctcgaacacgagtcgtctgcgcgccgtggaaagcgcttcgggcgaattcggaaagtggatcgttttgagcgcgtattcgaggcggcacagcgcgtatttcaggcgaagcgcatcgggcagcgggtctttgacggtctcagggagcaggcgcagggcttcttttaccgcgtttgcgatgatgcgagaggtgaggccgctcgtctgcgggtaaacaggcaccatgtcctgcatgcggctttcgggaacgaactccggggaggccatttcgcggcgcatgaacgtgcccgtcaccttgccgcgaaacgcgtagaccgcgccctccgtaagcagacttgtaatgtagcggttattgaaaaatgtcagctgcatgtcgtcttcgccgtccgtgatggtcgtcttgtaaagcgtcatgccgccgcggatacgctgctcgacaggacggcgcagcactgtgccttttacgatattcacttcgtttaagagtgtattgcggatgggcaccgcgtcgcgccaatcctcataagcgcggggatagagacgcagcagatcgcccaccgtgggcgcgccgagcttgcggaacagctccgcacgctttgggccgactccctttaaagacgcaatgtccgcttcaaataaagacgccatgaaacctccgacataaaacgaaaaaaggcagggcataaagccccgccctaagctgctttgaaattattccacggaaagaatgaagtagtagaccggctggccgccgtttacgaggttgatgtccacaccgtcgcctgccttgttcttgatgagacgcagtgcttcgttggcttcttcctcggtgatgccttcgccgtaaatgagcgtgataaacgaggtgtgcttattcatcagcgcctttgcgaccttgtagacggaacgcaccggcgtgtcgccgacaaactcgagcttgccgttcgtcatgcccatggtgtcgccctctttgattttgaagccgccgaattcggaatcgcgtgcggcgaacgtgaccgtgccggttgcgacgttttccgctgcggaaagcatggcggaagcgttttcgtctgcggaagcatccgggtcaaagctcagaagagcggagagaccctgcgggatggtgcgggtcggtacgacgataatcttgcggtcggtgacgagcggcacggcctgttctgccgcaaggatgatgtttttgttgttcggcagtacgaaaaccgtctttgccggggtggcaagaacggcttcgacaatgtcctccgtgctggggttcatcgtctggccgccgctgacaacctgtgcacagccgagttcttcaaagagtgcacgcagaccgtcgcctgccgctacggaaacaaagccgagttcctcttcgggggaaacgggctttaaggtctccttttcctctttgctggcctgcgccgcttcgtaagccgcgcggtttgcgttattgagttcggcagcttttttgtgctgctctttcatgttttcgatttttacggtcagcagggaaccgaattccagcgcttttgtgagcgccacacccggctgttccgtgtgtacgtgcaccttgatgatctcctcgtcatcgaccacaacaacgcagtcgccgagggtttcgaggaacagacgcagctcgttcggctcggtggtgacctccgggtcgcggccgacgatgaactccgtgcagtaggtgaagttgatttcgctgtcaaattccgccgcaacgcttgcaaagaactgggcggtctcctcggccttttcggcttcggtcatgtcggttttgacgatctcaccgtacttgaagacctgcatcatgccatcgaagatcatgcagaggccttgaccgccggcatcgacgacgcctgcttttttcagaacggggagaagatccggtgtggtggccagtgcttccgccgcgcccatgcagatggcatcccaaacgtaaatggggtcgttgtcgatctcggctgctgcagcgcctttttccgccgccacgcgggcaacggtcaaaatggtgccttcggtcggcttcatgacggctttataagcggaatccacgccgatggcgagcgccgctgcgagctgtgtaccgtctgcttctacggtgtcctcgagacctttcgagaagccgcggaacagaagggaaaggataacgccggagttgcctcttgcgccgcgcagcatggcggaagccgccgtctttgcgaccttagcggtcgtttcgttatccgcaagcgcctgcatggcgtcgctgcctgcaccgatcgtcatggacatattcgtgcccgtgtcgccgtccggaacggggaagatgttgaggtcatccacaaatttccggtttttcaatatgctgttcgcgccggagatgactgcgtcgcgaagctgtttacctgtaatcactgcatacacatcctgtctaaaaacgttcggaaggcgaaaaaccggctcccgatagatatttgcatgtattttcaaactacactataccatagtttgcgtgaaaaaacaagggtaataccgcacagaaatcacgtttagcgcagggagaaacgctctgtgctgcgggtgaggcctgttttttcatcgatatcgaacaaaatgcagtcgagcttgcacggaccgtccgcaaaatcaaaccgcacgggcattttgcttatctgctttttgatgacgagctccgctctgacgccgagtacggactcgatggggccggtcatgccgacgtcggtgatgtatccggtgcccttcggcagaacggtttcatcggctgtctgcacgtgtgtgtgcgtgccgaacacggcggagacgcggccgtctgcataatagccgaacgcgcgcttttcgccggtggcttccgcgtgaaaatccacgatgcagattttcggaaggtcgggcgtttttaaaagcgtatcgagtgtgcggaacgggcaggcgaggtgctcgtcaaggtatacattgcccattaagttgatgacggcgatctgcgtgcggccgagatctaagacggtcatgcctttacccggggcttccggcgggaagtttgcggggcggatgacgcagtcgctttcatcgatataatcgtaaaattcgcggcggcggtaggtgtggtttccggtggtgatgatatccacgccgctatcgagcaggtggtttgcggaggcaggggtgatgccgttgccgtccgaggagttttcgccgtttgcgatgacgacatcgatgcctttagtgcgcttgaaggcggggagagtgcggcgcagaaagtcgcacccgtggctgcccaccacgtcgccgatacataatatctgcatataggggtcctttcttttagtcaatatgaaaatccagcgttttggcgtttctcggcaaatcttttgtgtattttaaaaagcttgtgacgcggcggtcgtattcgtccgtgaccgtaaagccgagcgcttttgcggtgcgtttggtgagctccgtgaaaagctcgcctgccttaaacagtgcgcgccaaatgtcttcttcggtgcatgcggcgaaggtttcaaggtagccgttccagatgtctgcggggagaaggtcttttaaggcgtcaccgcatttgccggcgctgtaatcaaacccatgcagcgttccggcgtaccatttcatcatttgcagcagcattttgcgaatacaaatttccatgtgcgtctgcgcaaacaggagctggccgcgccacaggcccttggagacgtacggcgagacccaccagaactccgtgcggcagtcaaaaaacatacgctcggtcggctttttgacgtagtgcgtgctctcattcggctccggcagcttcggcagggcgttgtctttatctaataatacgacggaaaggcggtcgtcataacaatatacttcccagcggtcgatgctcgatacggtcaggtcgatgcggttgccgtccgcaaactgcatcagatagcatacgaactcgggaaagtgctctttaaaaagctcgctttcgtcggtgcgttcaaagacgaggatttcgccgaagtctttataataggctttttccttgcacggagtaagatcgcgcacgaggtacacaatgtcaaaatcattgaacgggtcgggcttacggttcgggttcgcacgggaaccgtttaagatgacggcacggatattttcatcggcatttgcatagccgaggatgaggtcatacatttctttttcgctgcgcataaaaactcctccgtgttttataggtttattttaccgcaaaacgggctttttttcaatgttctttttgattttggctttgtaaaacccgaaatgttaagcagttttacgtggattttacacaagacttctttttgagtttacaaaacggccctatactttcgcttgtaaaccaaaggaaaagataaaaggcgagcagaaagctcccgaaaggaaagagtaacgtatgaaactcagaaagatcaccgcggttcttgcagccgcacttctcaccatgacagctatgacggcttgctccggcggcgcagcaagctccgcttcctccgagacaccgtcctccgaatcctccgctgcatctgcgcagagcgcttcctccgaagaaacgaccggcggcgacatgaccggcgaaatcaccgttctttcccgtgaagacggctccggcacacgcggcgcgttcatcgagctgttcggcatcgagcagaaaaacgacgctggcgaaaaggaagatatgacgacggatgatgcgcagattacgaacagcacctccgttatgatgaccaccgtgcagggcaacccgaaggccatcggctatatctccctcggctcccttgacgaaagcgttgtcaaagccgtggagatcgacggtgcggcgccgaccgttgagaatgtaaaggccggcacctataaggttgttcgtccgttcaacattgcaacaaagggcgaggcaagcgaagttgcacaggacttcatcaacttcatcatgagcgctgacggtcagaaggttatttccgaaaacggctatatcaccgttgatgatgcggctccggcttacacggcatccggtgtttccggcaaggtggttgtcggcggttcctcctccgttacgccggtcatggaaaagctgaaggaagcttatatggcgctgaacccggacgttaccgttgaagtgcagcagagcgactccaccacgggtatgacctccaccatcgacggtgcgtatgacatcggcatggcttcccgtgagctgaaggacagcgagcttgaagccggtcttaccccgactgtcatcgcacaggacggcatcgctgttatcgtcaacaaggaaaacacgctgaccggccttacgagcgagcaggttttgagcatctacaccggcgaaacgaccgattggtccgagcttcagtaagaaacaatccataaaacgcaggagagccgggcggaaaggtccggctcttttcgcaaggaagccaataaagtagttttgaaagtttgaaaggtgcgtgcaaaccgtgaagtggagcaacataaaagagcttctcatgcatatcctcttttttctcacagcctgcgtatcaatctttgccgttgttttgatctgcgtgtttctgtttgcaaacggtattccggccattggtaagatcggtgtgtttaaatttctgctcggcactaagtggaagccgggcaacgacatctacggcattctgccgatgatcctcggcagcctctacgtcacggcgggcgcaatcatcatcggtgtgccgattggacttctgacggcggttttcctcgcgaagttctgcccgaagggtctttataagattttaaagcctgcaacggagctgatggcgggtgtgccgtccgttgtgtacggcttcttcggtctcgtggttttggtgccgcttgtgcagaacattttcggcgtggcgggcaacacgatgctgacagcgtccgttttgctcggcattatgatcttgccgacgattatcggcgtttcggaaagtgccattcgcgccgtgccggacagctactatgaaggctctctggcgctcggcgcgagccatgagcgcagcgtgttctttgcgacattgccggcggcgcgttccggcattttggcgggcgtggtgctcggcatcggccgcgccatcggcgaaacgatggcggtcgtcatggtggcgggcaacaaaccacgtatgccgcagggtttgctcgacggcgtgcgcaccatgacggcgaacatcgttatggaaatgggctacgccacagacctgcaccgcgaggcgctcattgcgacggcggtcgtgctgttcgtctttatcttaattatcaacgttacgttctcgcttctgcgcagaaaagacagggcatgacccggaaaggatacggaaatgactatggaacgtacctgtaaacccgtggcggcagagaccatcaacaagctcaccttcaaggataaaatgcgcgcctataagcgctcgccgctttcgcttattttattgctgcttgtctgcggcgcggcgctcatcacgatgctgacgcttttataccttatcttttacattcttgtgaaaggcattccgtacatcacgccggaccttttctcgttcacctatacatcggataacgtgtcgctgatgccggcgctgatttctacgatcgtcatgacgctcatcgcgctcgttatcgcgctgccgctcggcatcggcgcggcgatctactctgtggaatacgcaaagcgcggcaacaaacttgtgcagctcgtgcgcatcacgaccgaaacactttcgggcattccgtccatcgtgtacggcctgttcggctatctgtgctttgtgacggcgctgcactggggctattctttgcttgccggtgcgtttacggttgccatcatgattttgccgctcatcatgcgcacaacggaggaagcgctcatctcggtgccggattccttccgcgagggcagcttcgggcttggcgcgggcagactgcgcacggtgtttcacatcgtactgccgagcgccgtgccgggcattttgtccggcgtgattttggccattggccgcgttgtgggtgaatccgcggcgctgatgtacactgcgggctccgtggcgcagatgccgggccaggcgggcggcggtctgttcgattccgtgcgaaccctctccgtgcacatgtatgtgctttcgagcgagggcctgcacatcgacaaaacgtatgccacagcggttgtgctgctggttatcgtcatcggcatcaacgcactgtcctcgttcgtcgcgaagaaaattacgaagaaacagggctaaagcgagctttttagaaaatcacaccagaaaaagataggggaaacgatatgagctgtaaattggcaatcgaagatctgaatttgtattacggcgatttccatgcgctgaaatccatccatatggaaattcagccgaacgagattaccgcgttcatcgggccttccggctgcggcaaaagtacgctgctgaaatccttgaaccgtatgaacgacctcgttgagggctgccggattaccggcgcagtaaaattggacggcgaggacatctaccacggcatggacgtgaaccttttgagaaaacgtatcggcatggtgttccaaaagccgaacccgtttccgatgagcgtgtacgacaacatcgcctacggaccgcgcacgcacggcatccgctctaaggcgaagctcgatgacattgtggagcgttctttaagaaacgccgccatttgggacgagcttaaagacagactgaaaaaaagcgcgctggggctttccggcggacagcagcagagactgtgcattgcacgcgcgttggctgtggagccggaggtgctgctgatggacgaaccgaccagcgcccttgacccaatctccacttccaagatagaagaccttgcggtggagctgaaaaaggattatactatcgttatggtcacgcacaacatgcagcaggcggcgcgtatctcggacaaaacggcattcttcctgctcggtgaggtcatcgagtacggcgagacggagagcttattctccatgccgaaggataagcgcacggaggattacatcaccggcagattcggttaaggcttgcgaaaggaacgtgactacaatgagaaatcgtttggacgagcagctggagctgctcaatacagagcttatccgcatgggcgcactgtgcgaagacggcattgcgcaggcggcaaaggtacttgtgacacgagacgaagcgctgcgccgcgccgtggacgaaacggaacaggaaatcgaccgcaaggagcgcgagattgaagcaatctgcctgcgcttgcttttacagcagcagcctgttgcaaaagacctgcgtctcatctctgccgcgatgaagatgatcgcagatatggagcgcatcggcgaccaggcttcggatattgccgaaatggtcgagcatatccgcgcagaggtgctgccgggcagtctgcacattgccgaaatggcgcgcgctgccgtgaaaatggtgacgaacagcgtcgattcgtttgtgcgccgtgacattgatattgcgcgcgccgtggaaaaagcggacgacgaagtagatgcgctttttaacaaggtgaaaagtgagatcatcgcactcatcgccgaaaagcccgaggagggcgagacatgccttgacctgctgatggtggcgaagtattttgaacgcatcggcgaccacgcggtcaatattgcggagtgggtcgtgttctcactcaccggcgagcacgattaagcggcaaagccgcacagaaaggatttaagggtttatgatctatcttgtggaggacgacgacagcatccgcgagcttgtactctatacactgcacaccaccggttttgaagccgagggcttccggaatgcggccgatttctggcaggcgcttgaaaaagagctgccgcagctcgtactgctcgacattatgctgccggatgaagacggtctgcatattttgaagcgtctgcgcgcgggtgcggaaacggccgacctgcccgtgatgatgctgacggcgaaaagcagcgaatatgaccgtgtggttgggctggacagcggcgcggacgattacatgccgaagccgttcggcatgatggagcttgtctcccgtgtgcgtgcgctgctgcgcagggccgcaaagcccgcagcggaggataagctttttacggcgggctcgcttgcggtggatgtgaagcgccgcgccgttacggttgatggtgaacccgtgatcctcacgtacaaagaatttgaactgttgtgctatctgctggaaaaccgcggtgtggtgctttcgcgcgatcagattctcacgaagatctgggattacaattacagcggcgagacccgcacggtagacgtgcatatccgcacgctgcggcaaaagctcggcgatgccggtgcgctcattgagaccgtgcgcggcgtgggctaccggctggcacaggattaaagaggagaaagacgcatgaagaaaaagatcattttcagcatgtcgtgcattgcgctgctttccattttactttctatggtgctttccggcgtcgtttcgtactacgattcgctggaaatcgtgaaaaaggcgaccatagcggaaagccgctacattcaaaacggcatcgcccttggcggggacgattacctttccgacatccgctccgccgggtatgatacagctgccgcgcagtctgtgcgcgtgaccgtcatcgatacggacggcgcggtgcgatttgacagtgttgcagatgccgcaaacatggaaaaccacaacgaccgcccggaggtcattgctgcaagagaaaacggtgcgggggaatccgtgcgtgaatccgatacgctgaatgtgcagtcgtataactacgctgtgatgctctcggacggacgcgtgctgcgcctttcggtcggtatgaagacggtgttcggctccattgagcgcatggtgccgtggatgctgctgtgctccgtcattattttggtgctggccattttgctttccacgtaccgcacaaagcagattgtggcgccggtcaacgccattgaccttgaccacccgatggaaaacgacgtgtacggcgagctttcgccgctgcttttgcgcttgcagcgccagaacgagaccatcaaggagaaaatggaagagctgcaccgcaagcagacggagtttaccgccatcaccgaaaacatgcgcgagggctttattgtggtggatgcaaagggcgatgtgctttcgtacaacacgagcgctgtgcgccttttggacgtgcacccggaggacgaccgcccacagagcgtgctggcgtttaaccgcagccccgatttccgcgatgcagtggattccgcgctgacgggtacggcgagcgagcgcatcacaaagctggcggggcgcagttacagtctcatcgcgaaccccgttacgaacgataacggcgtgcagggcgcggtgatcgtgctgctggacgttaccgaaaaggaagagaacgagcgcctgcgccgcgagttcaccgcgaacgtttcgcatgagctcaaaacgccgctgacttctatttcgggctatgcggagattatgaaggacgggctcgtcaagagtgccgatgtgccgcgctttgcgaacaacatttataccgaagcacagcggcttatcacgcttgttgaggatattttgaagctttcaaagcttgacgaaaatgcggtagagctgggccgcgccgatacagacctttacgccgttgcgcaggaggtggcctgccgtctgaaaatcccggcgcagcagaacagtattgtcatctcggtgcagggcagcgcggcgttcgtcaccggcgtgccgtacattttagacgagatgctgtataaccttgcggataacgctgtaaagtacaaccgtcccggcggccgcgtggtgatctccaccggcacggaaggcggccacgcatatatgcaggtcagcgatacgggcattggcattccggcggccgaccgcgagcgcgtgttcgagcgcttctaccgtgtggataagagccgctccaagcagattggcggcacgggacttgggctttccattgtaaagcacggcgccatgttccaccatgcgcgcgtgtcgcttgaaagcgagccgaacaagggcaccacggtgcgcgtcacgttctaaaataacggttaaatgcggtacggaagcgagctttctgcgccgcatttttatttttgacattctgcgcggttgtgctataatacgagcagagcagcaaaaccgaaattcgggaggacagtatggttgaatttttgaaagaggcggcgcatgtggtgccgtctaaacgacagcttgattggtttgagatggaacgctatgcgtttgtgcattacggtgtgaacacttacacggaccgcgaatggggcgagggcacagaggacgagaagatttttaaccccaccgcgctcgattgcgaccagtgggtggaagcggtgaagtctgcgggcctcaagggactcatcctcacggcgaagcaccacgacggcttctgcctgtggccgagcaaatacacggagcacagcgtgaaaaacagcccttataagggggacgtcgtgcgtgaagccgcagaagcctgcaagcgcggcggtatcaagttcggtttttatctttctccgtgggaccgcaactcaaaatattacggcacgccggaatataacgattacttctgcaatcagctgacggaacttttgaccggctacggcgatattttctgcgtgtggttcgataacgcctgcggcgagggcgaaaacggcaaaaagcaggaatacgacttcccgcgttactttgagctcattcgcaagtatcagccgaacgccgttattttcaatgatttcggcccggatacccgctggtgcggcaatgaggccggagaggcgcgccatgccgaatgggccgttgtgccgagcgagctgtgcttttacagcgaggtgcagaccggcgcgggtccgatggcagaagacggctctttgcgctacatgtacaacacgaaccgcgagattggcaccatgccgaacatcctctactcgaaggggcttgttttcgcaccggcggagatcgacatgaccattcgtccaggctggttctggcacgaaaacgaggaaccgcattcgcttgagagactgtacaatacctacctgcgttcctgcggcgcaaacgcctgcctgaaccttaacgtaccgccgacgcgcgagggcaagttcgatgaacgcgacgtgaagcgcttgaaggagttcggcgacctcatccgcgagacgaccgaaaaccgcattccgtgcacggtggagcgcatcggcggcacgcccacgcagcccgtgtatgagctgaagaccgaggggccggtggagatcggctgcgttgtgctgcgcgaggatctcacgcacggtcagcgcgtggagggcttccgcattctcggcatcgacgaagaaaacaaggcggattacgcgttattcgagggcacgtgcatcggcaataagcacatctgcgagctggaagatccgttcgccgtgcagaacccgctgacgggccacacgaacaaaaagctttccggcgtgcgcgtacagattaccgctgcgcgcgacgaggtctttatgcgcgaaatttacatcacgaaagggaaaagcgtatgcgagcagaaataaagctgacggacgtgaaggacattcgcgatttgcacgagtatatcaacgcggagctgcgtctgcgccgcgttgcaccgacgttggaagctttgcaggcggcactggaaatgccgaaaacggaagcggaaattgagtttacggactacggcaaaatttccggtgcacttttagattatgtaaacaaaatgattgagatgatcgtgattgtcggagagaagaacccgaacgtacaggtcatgatcacaatgtgaaaacagaataccgataaagctcagagctgtgcggaaaacggaaaaatcgcaccccgttttcctgcacggctcttctttttttgacaaaaagacgcacatatatattgatttttactgattatgattgagttttacaaaatatatttggttgacaataccaaaaattctgttatgattataaccgaagccacgaagcagaaaggcagggataagcatggagcgggcggaaaaagcgaaaagcccggaaatggaaacggcagggctgccgccgaatgacaggaaaaggttttatgtaaacggcaggcacctgctgcgggagatcgccgggctgtacgtgctgatccctgccggggagacggacgcgccgcagaaccgcatcaccgcgctaaacgaaacgggacggtttttgtggatgcagtttcagcacccgtgcacggtggcagaagccgcggctgcggcagaggcgcagtacaccgggcagccggcagaaatgctgcgcggcatagaaaactttgtacgggcagggctgcgcgcagggctgctgcgcgaggcttccgctgcggaaaaaacggaaggaaaggcggtataaaatgaaaaaagcatggagcgctccaatgctgcaaacggaggtgtttgaggcaaacgagtatatcgccgcgtgctacacgggcgtgtgcgatatttcgggagaggtgtttttggactcgaacggcaacggtgtgtatgaccgcggcattgacagcagaaagtactataacgaggcgtgcggacagcagtattccatcaccgggcaggattccgtgatgccggcgaagaacgcattcgtcgtggactggttcggaaatgcgacacctgtatggaactttgacgattaccatgtcaccacaacgctgacgcagaacgagcggccgaaccactcgtgatgcacccggagaaagacacagcggaagcgtttttactgcgccgcgccgccaaagcgggcgtgcccatcaccggcagttttgagctgaacccactttgtaacttaaactgcaaaatgtgttatgtacgcatgaacaggacagagcaggagaaaatcagccgcctgcaaacggcggaggagtggacagcgcttgcggaaaagctacgcgacgcaggcacactgtttttgctgctcacgggcggcgagccgcttttgtaccccgcgtttcgcgcggtgtatctcgcggtgcgaaagcgcggtatgatcgttacggtgaacacgaacggcacgcttttgaatgaagactgggcggcgttttttgcgaaaaatccgccgcgccgcgtgaacgttacgctgtacggcgcaagcggagagacctacaagtcgctgtgcggtgacgagaccgggtacgcaaaagcaatgcgcggcattcagcttttgcaggcgcacggcgtgccggtgaaggtcggtgtcagcgtggtaaaacaaaaccgacatgaccttgaaacgttatttcaaatcacaaaggaacgaaatttagagttggagccggacacctatatgctgtccacaaaaagcggacagcatgaagcgcggctctcgccggaggaagccgcggccgcaagccttgcagcgacgagaataaagcttggcacagtcggttttcacgaatatgcgcaacgcacggtacaggcgctggaaagcgctgttccggaaacggaagccggcatgcgctgccttgcagggcggtgttcgtttgccgtcggctggcgcggcgatttgcgcccgtgcgtgatgctcggggcgctttccgtgccgatcgaacacaacgacgtgcaggccgcttggcgtgcggtgcgggagaaatctgcggcgcttaaacagaatgaagcgtgcgtcgtatgcaagctgcgtccgctgtgccgcgcgtgtccggcatcgtctttgcgcgagggcggcgcgttcggcacggtgccgccttatgtatgcgcctacacaaaagcgctctaccgcctgctgtgcgcggaaagcacagcgcccgaaattttgaagaaaggagagactgtaccccatgcacaggctctttaagttgggcggtttctgctttgcggcagatcaccccgatacactcgtttttccaccgaattttctgcgttttgaaacgaaagacgtgcagcctgcgtatttctacacgctgcgctttgtaaagagcatcccgaaccccgtcggcgtgtgcacggccgtacgggaagacctcatcgtgtatcgcgacggcgaaaaggaatcgaggcttttgggtatacagggcatgcttggcttttacgcattgtatcgcgagctggacgacacgcacgccgaggtgatgatcgccgaagactgccgcggctgccttgtgtttgacccggtattcgcgtcgcttttcgcgcttgagcgccgcatgctgcaaaaggacagctttattctgcacagcgcctacatacgccaccgcggacgggctattctgttttcggcaccgtccggcacggggaagagcacgcaggcctcgctctgggcgcaatacgccggggcggagatcatcaacggcgaccgcgctttattgcagaaggtgcaggattgctggatggcgcgcggttggccggtctgcggcacgtcgggcatctgccaaaatgcggatgcgcggttgagcgccgtcgttttgctgcggcaggcgaaaaagaacgccgtgcgcaggctctcgcgcggggaggcatttttgcggctttacggacaggtgacggtgaaccgctgggatcaggcggaatctgcgcgtgtgctcgatgccgtggaagcactgctgcgccgcgtaccggcgtttttgctggattgtactatatcggaagaagcggtcgactgcctgtatgaggcgctgtaccccgcgaccgtggcggagaccgtccgcctgcgcgcatgcttatagatgctgcggggctgcgcgcgtacatcggcgcgatcctttccgaaacggaagcgggcggcgtgatggaaatgccggtgttcggcagcagtatggcgccgtttctcatccacgggcgggacgccgtgcggcttgtaaaatgcacgcacccgccaaagcgcggggagatcgtgctgtttcggcggttagatgggcagtatgttctgcaccgcgtttggcgcgtgacgaaaagcgggtggtatctccttggcgacagccagaccgaccccgagggccccgtgcacggcgagcaaatttgctgccttgtccttgccgtgcgccgcaagggtaagtggtacggccgaaacagtgcgctgtggcggtttttcaaaaccgtatggctcgttttaataccggtaaggccgctttttatcgcgatgcttgcgcgccgccatgcccgaaaagaaaaggtgccaaatggagcgtaaagaaaacaaagtgcgcttttgcgcgctcagtgaggttttggcggactggaaatggctgctcacgtacagccgccgctgcaagaaaatgatcgcgctgtatattgcgctcggcgtgctcggtaccacggtcggtctgttcggcagcgtggcgggcaagtacctcatcgacatcgtcacggggtacgataccgcccgtctgccgcttttggttttcgcggctattggcagcacggcggtctccatcgcgttcgactgcgtggtgagccgcgtgctgaaaaagctggagattgacctcaataacaacgtgcgcgccgatgtgttcgaccgcattttagacgcggactggcaggcgctgcacgcgttttcctgcggcgacattttaaaccgctttgaaacggatacgggcgctgtgggcggcggggcagtgagctggctgccgcaaattttagtgacggcttacaggctatgcgcggtgtttttcctcatctggatttacagccccgtgatggcgctcatcgcgctcggcggcgcgccggtggtgttgctgctgtctgccgccgtgctcaaaaagcggcgggcatttgaaaataagctgcgccgcctcggcagcgaaatgaccgcgtttgaagcggagacgttttacacggtcgacacggtgaaatcgctcggcacaatgcaaagccaaagccgaaagctaaaggaaaaacaggaagcgctgcgcacatgcagtttgcaatacaacatgttttccgtgcgtgtgaatgcgcttttgcgggttgcgggggcgttcacgcagtttaccgccatgggctacgggctgtatttattgtggacgcgtgccattacattcggtacgctgacactttttttgcagcagcgcagcagcctgacaagtgcgtttgaaagtgccgcagggcttatcccgaagtttttgagcacggcgatctctgcacaccgtgtgcgtgagctttgcgagctgccgaaggagcgccacggtaaaacggcactgccgcagggcgcactgatggtagaactcaaaaatgtgacagccgcataccgaaacggcgaagcggtgctgaaaaacgtatcgtttgtggcagggccgggggagattgccgtacttgtcggcacatccggcgcggggaaaacgacgctggtgcgtgttttgctcggactcgtttacccggaaagcggacgtgctgtgctgcgcgggaaaaatggatgcgaaatcgtcatcagcgccgagacgcgctgtgcgttttcgtatgtaccgcagggcagcacgctgttttccggcacgattgcggagaacctgcgcatggcaaaagagaacgccacggaggaggaaatgacagcggcgctcaaaaccgcctgcgcatgggcgtttgtgtcatcgctgccaaacggcgtgaacacgaagatcgcggagcatggcggcgggctttccgagggacaggcgcagcgcatcgccatcgcccgcgcggtgctgcgcggcgcgccgatcctgctccttgacgaagcgacctcggcgcttgatgaaaagaccgaagcgcaggttctgaaaaatcttttaaccgcgctgccggataccgcgtgcattttgacgacgcatcgcccgggcgcgctgaaatactgcacgcgcctgtacaaagcggaaaacggcgcgctgacgtgcatagaagtgaacaaacccgcctgaaagacgttttaaatgcgtttttcggcgggttttgtttatgactttgggcgggattttgccgaacgcgcagtcttttccgcgcgtgggtgaaaatgcttggtcattttgaatattgccgttttggttgtaattccttataataatgtgcgtatttgaaaagagaaggggaaacggacatgaataaggacttaacgaccggcaagtcggcgagtgttttgctgcggttcacgctgccgatgcttttgagcgtggcgttccagcagctttacaatatcgcagacagcgtcatcgcgggcaaatttgcgggtgaagacgcgttggcggcggtgggcgcttcgtaccccgtgacgatgatcttcatggcggtcgcgttcggcatgaacatcggtatttcggtcgtcatctcgcagcttttcggcgcgaaggattttaaagaaatgaaaacggcggcgtatacgggttttatttctgttgcggtgcttggcgtggtgctcacggtcgtcggcacggtgctgtgcgagccaatcttacgcatgctcagcacgccggagaacatcatggaagatacggcgctgtaccttgctatttacatttgggggcttttattcctttttatctacaacatttcttccggcgtgttcacgtcgctcggcgacagcaaaacgccgctgtggtttttgatcgcgtcgtccgtcggcaatatcgtgctcgacgccgtgttcgtcatcgtattccactggggcgtcggcggtgttgcgtgggcgacgttcctcgcgcagggcgtggcttccgcgtgtgcgttctgggcggtcttgcgccgcttaaagtccgttgagacaaaagaaaagcctgcgctgttttccggtgcgatgctgcgccgtatttcgatcgtagccattccgagcattttgcagcaaagcttcgtttcggtcggcaatttgtgcattcagggacttgtcaacggtttcggctcctccgccatcgcgggctattccgcaggcgtaaagctcaacacgttcgccatcacgtcgctgacggcgctcagcaactcggtttcgagctttacggggcagaacatcggcgcgggcaaaatggaacgcgtgcgcagcggcttcaaagcagggcttgtgatgtcgtttgctgtggcgctcgtctttatgggcgcgtatgtgttctgcggcgaaaacctcctgctgctctttatgaacagcacctcggcggaggccatcgagatcggcaaaaaatttctgcttattgtctcgctgtgctacctgttcctcgcattaaagcttgccgcggacggcgtgctgcgcggtgcgggcgcaatggtatattttatgattaccacgttcttagacctcattctgcgcgttgttctggcgtttattctggtgcacccgttcggcgtcacgggcatctggctttcgtggccgttcggctggataatttccagcacattgtcgctcgcgttttacctttttggcgtgtggaatccgctgaaaaagaaagcataaacggcaaaaagccttacaccaagctcaaaaaagagcaaggcgtaaggcttttgttatttcattgcatttcggcccgcttatgcgtgacccgtcacgcgcagatagtccgcataggtgccgtcgaaaacgttgattttccggttttcgagtacggcgatcttcgtcgcaagtttatcgatgaaatagcggtcgtgcgaaatgaacaacaaggtgccggagaactccaacaaagcgtcctcaagcatctcgcgcgtttcaatgtcgatgtggttcgtcggctcgtcgagaatgagaaagttcacgcggttctgcaaaagaacggcgagctttaacaacaccttttcaccgcccgaaagagaagagacgcgcttcatcaccgccgcgccgcagaagtaatactttgctaaaatttgccgcgcttcgccctcgccgcaaacacactcgcggcggaatgcttcgagcacgctgtccttgtcgtttaaaaagcggatttcctgcggaatatacccaagctgcgcggaggggttgaacttcgctgtgccggaaaatgggacatccccgaaaattgcgcgtaaaagcgatgttttgcccgtgccgttcgcgccgagaaacgccatgcggtctttttcctccacaagcagctctgcctgttcaaacagcgcggtcttgccgaacgaaagggagaaacccgtaagctttaaaacctcgcgcccggtgcggtcgcccgcaaagcgcatcgggattttgggcttttcaagctgcgggcgctttatcatctccattttctcaaggcgaagctccagcattttggcgcggcggaagaacttcggattatccgcctgcgcgccccactcgcgaaaacgtttgatggcggctttcattgcttcaatctgcttttgctggtttttgtactgctcgaattcgaggagcatctggcgttcctgttcctctttcgcagccgtgtagccgccggggtagcttgtgcagatgccgtcctctaaaatgagcgtgcgcgttgccacacggtctaaaaaccggcggtcgtgcgagaccattaaaaccgtaccgcggtattttgcgaggaagccctcaaaccagtcgagcgtctgcatgtcgaggtgatttgtcggctcgtcgagcagcagaatatccggctcacgcaggacgacggcggcgaggttcacaacggtcttctgcccgccgctgagcacattatacggccgctcgagcaggtcgttcagcttaaacccctgcacaatgtttttcagccgcgtttctgcgtcatagccgccaagcgccgcataccggctttgcgcctcggtgtatgcgtcggcatagcgctcgaaatcctccgtcatcttttcttccagttcgcgcagcttcgcttcaacggagaaaacttccgcaaacggctcgcaaagcacgtcgtacacggttgcgtctttgccgcgcaggcggggaatctgttccaaaagcgcagtgttcgcaccgcggcgcagggagatttcaccgctgtccgggctttcttcgcccgcaagcagctttaaaatcgtcgatttacccgtgccgttgcgcccgatgagcgcggcgcgctcgccggtcatcacttcaaagctcaaatcttttaagacgggcttgaagccgaaatttttatttacatgtgaaaaactgaattctgtcatttttatcgctcctgtttttgaattgatttgtacattcaaaaaagcaggccgaggcagaatacatcaggcgatccaaagaatcgctccgtacaaatggatagccttagtctctgtccatagagcctgcacggagcacatcgaatcggattcggaagcaaaatgcgtggtaattgatccgaaccatatcgctcaccgtcctttcgtgcgcgaaagcgctttgctttcaccagtatagcgcacaaaaacggacttttcaagaagaattaatacgccacggcggaaagcggagtttaagttgatttttggcggcaaatccgctataataatataaaataacagataccttaggcgtgctttgtgtgggacgccgaaaacaagggagcaaaagccgctaaaacagcataaaaaggcttttgcagccgtcttaactttagggaggaagatcacgatgccggaagtttacaccataccgctttccaagatcattcacgagttacagcttgagaccgcttttctgccgaagagcgccgatgatattttgattcaatcgagagacgttgttcgccccggcatggagctgaacggctaccacgaatattttgacccgaaccgtatcgccgttttaggccgtgcggaaatgtacatgctggagagcttaaagccgtcgcgccgcgccatggcgctggatagctacctgtccctgaagccgccggcagtgattgttgcccgcggtattgaccccggcaaggacttcatggagattgccgaaacgtaccacgtgccggtgctgcgcacgacggagtcgacctcaaatgttgtcgcgtcgcttgttgcgtatttgaacgtcgagcttgcgccgcgcatcacacgccatggcgttttggtggaggtttacggcgaaggtattctgcttgtcggcgacagcggcgtcggcaagagcgagacggccattgagctcatcaagcgcggccaccgtctcatcgcggacgatgcggtggaaattcgccgcgtatccagcaaatcgctcgtcggtcagtccccggagaacatccgtcacttcatcgagctgcgcggcatcggtatcatcaacgcccgtcgcattttcggtatgggcgccgttaagctgcaggagaaaatcgacatgtgcatcaacctggagatctgggacgcaacgaaggtctacgaccgcatgggcatggacagcgaatacacggaaattctcggcatcaaggtgccggtgatgacgattccggtaaagcccggccgtaaccttgccatcatcattgaagttgcggcgatgaacaaccgccagaagaaaatgggctacaacgccgcctacgagctgctctccgcgctcggcatggatgcttccatgatgccgcacgaggagattaagagagatttggatatttaacagcatgattttagtataaaacaagatgttttggcattttgttcaggaactccttttgatagggtttcctgcggtcggacaattcaccggattgtccgatctaccttcctgatcttttggtaggcaaaagggtttcgctttctgcggaaagcggcttagggcgctgccctaagaacctgtaaacttcctgaagaaaatttcatcaaagacttttaaccgcgtttaaggttagctgaaagtgagaaaacatcatcatgtataacatcattgcagatttgcatacacattcgctggcgtctacgcatgcgtacagtaccattcgcgaaatggtcgattccgctgcggaaaagggcctcaaagccatcgccatcaccgaccacgcccgcaccatgcccggtgcgcccggcccgtggttctttaattccatgcatgaactgccgcttttataccgcggcattctgctcattgcgggcatggaggcgaatgtcatcgatttgaacggcacgctcgacatcaatgagaccgaacgccgcgacgtcaactggcttgtggcgtccattcacaacctcggactgccgggacttgagaatcccacggtcgaaaaatgcacgcagctttggctcaacattgcacacgatccgaaggtgaatgttatcggccacagcggcagtccggagttccgctacgattatgaaacggtcattccggagttcggtcgaaaccacaagcttgtggagattaactcgcattcctttgaggtgcgcaaggcgaatatcccgaactgccgcgagattgcgctgtgctgcaaaaagcaccgtgtgccgattatcgtcagttcggacgcgcattttgagacgcaggtgaaggatcacactgcggcgctcgagatgctgcgcgagattgcgtttccggaggagctgattctcaacgcgaacacgaaccgcctcatcgagtatctgcgcgcgcacacgaacatccttgaaaaccgcaaggatgccgatgctattttaaggagctttgagaatgtctgattaccgtaaatttgacgccgcactacaaagtgccggcgtatgctataagaccgatgagcccatgtccgcccacacgtcgtttaagatcggcggcccggcggatcggtttgtcgaagtgaagaccgtctctgaattgcaggcggttttaaatgctgtatgtgacgagaatgtcccgtatttcatcctcggcaacggttccaatctgcttgtgccggacgagggcttgcgcggcgcggtgctgacgctgcagggcgattttaaaaaagtgcagagccttgcgagcggtcatgttttgtgcggcgcgggtgcatcacttgcgacggtatgcagctttgcacgtgggcaggggctcacgggccttgaatttgcgtggggcattccggggcagctcggcggcgcagtgtacatgaacgcaggcgcctacggcggcgagatgaagcaggtcgtcgaacgcgtccattttcttgaagcggacggcacgcccggcgtaatgagcggggaagacctcgcgttcggttaccgcaaaagcgcctttatgggcacgaagcgcatcatcacaagcgcggagctgcgtcttgaaagcggtgcggaagcggagatcaccgcgaaaatggaagatttcatgcgccgtcgccgcgaaaagcagccgctcgagctgccgagcgcgggcagcgtattcaagcgtccggagggctattttgccggtacgctcattgaacagtgcggcctgaagggctttgccgtgggcggcgcgtgcgtcagcgaaaagcatgcaggcttcattgtgaacaaaggcggtgcgacgtgtgccgatgtggaagcgctcatccgcgccattcaggatacagtttttcaggcgaccggcgtggagctggagccggaaattcgccgcatttcgctcaacgagtaaaatttgtgggatttacggtggcatttggctgccgaaaaggtggtttttaaaatggaatttgtgatcttgaccggcttatccggcgcgggcaaaacgcgcgccatgcacgccatggaggatatcggcttttattgtgtcgataatctgcccccggcgctcattccggtcttttacgatctttgcgataaatccgagggtattcagcgccgcgtggcggtcgtcacggatacccgcggcggcgagctttttaagtcatttttcagcgcgctcgaaacactgaaggcgcagaacgagccgtataaaattttgtttatggatgcgtccgagcccgtgcttgtcaaccgctttcaggagacgcgccgcaagcacccgctttccgaagcgatgcagggctctttggagcaggccgtgcgcctggagcgcgagatgctgcgcccggtcaaagaggtctccgattacgtcatcgatacgtcgaacattccggcggcgggactgaaagcgcgcatttccgacctgtttttgcagaacgacaacgacgccattacggtgcattgcatcagcttcggctttaaatacggtctgccgcttgaatccgaccttgtgtttgacgtgcgctgcctgccgaacccgttctacgtggaggagctgcgtgaacataccggccttgaagcgcccgtgcgcgactacgtgatgaactgcaaggaaaccgagggctttaaagcccgctttacggacatgatcgattacatgctgccgctctacattcaggagggcaaaagccagctcgtcatcgcggtcggatgcaccggcgggcatcaccgctccgtggcgcttgcgcagtatatgcacgatcaccttgtcgcaaacggcgttcacgccacggtctcgcaccgggatatcacgaaacaataaagcgggagggagccgttttcatgtcatttgctgcggattgcaagcaagagctgtgtatgattgaaaataagcgcgcgtgctgtttgaaagcggaatgctacggccttctgcttttttcaaagtgtttttccgcgcgggaatcgcagatggtatgcgaaaatgccgccgttgcacgccgtgtggcggaggctgccgccgtttcggccggtgtatacgccgaggtgcgctcgcagttaaggcgcaagaatatcggcgcgtatgccatcaccattccgggtgaagccgcacgcattcagatgatccgttcgttcgggcatgatgagaatgacgtgaacctgcatattcatgaggaaaatctgcaaaaggactgctgcatttcggcgtttttgcgcggtgtgttcctcatctgcggcacggtcacagacccgcagaaggagtatcaccttgagttttccacgccgtacctgcaccttgcggaagaccttgtggctgttctgcaccgcgtgaaggccgcacagctttcgccgtctattgcacgcagaaaaaacagctacattgtctacataaaagaaagcgccgccattgaggatttcctcacgctgacgggtgcggtaaactccgccatgaacctgatgcagatcaaaatgtacaaggagacctacaacaatttaaaccgtgtctcgaactgcgagaccgcgaatcttgataaaacgtactctgctgcaacaaagcagattgccgccattgcgctcatcagcgacaaggtggggctggacgagctgcccgccgacctgcgcgaggccgccgttttgcggctggaaaacccagaaatgtcgctgcgcgaaatgggggagcggctttccatcagccgttccggtgtgaatcaccgcctgcgccgcattttggagtttgcggaacagctcggctcgccggaggaatcccttgcggagcagagcgtttttgaagtggaggaaaagctgcatgctgaaaatacaaagaccgaagagctttaaagaccttgtgttgggcattttgattgttgcggtgctcggcgtgggcgcgtatttcatcgccgatgcgctgaaagccgagcttgtgcccggcgatatcgtggtgcgctccggcaatgaagagattaccgcgctgcagaacgtgaccggcgagcaaaggaagaacggttcaaaagcgtgcggcgggcattttgaaattgaaaaagttgccgatgaattcccggtcattcgcatggataaaggcatcgtgcttgaagcctcgcaggatccctacggcgcgatgtattacacggtttataacgaggatttctccgagctttactaccgcagcgagcggtttgcgtaccctgaaaacgacggcacgtactacgttgtgatcgataccgcgtggggggataaaaaccactatttttccaccgagcacggatttacccttgtgattgaaaacggcaattagaggtttatgtaaatttaattatgtaaacttaaatggaaaaggagggcgaaaatggcgtttacacatttgcatgtgcacaccgaatacagccttttggacggcgcttgccgcattgaaaagctgctcgataaagcgcaggagatggggcagaaaagcgttgccattaccgatcacggcgtgatgtacggcgtgatcgacttttataaggcagcgaaaaagcgcggcatcaagccgatcatcggctgcgagatctacgttgcaaagcgcagccggttcgataaaattcacggcatcgataacgaaaaccggcatcttgtgctgctgtgcaaaaacgaaacgggctaccgcaaccttgtcgccattgtctctaaagcgtggacagagggcttttacagcaagccccgtgccgatatggagctgctgcgtgaacacagcgaggggctcatcgcgctttccgcctgccttgcgggtgaaatcccgcgtgcgctttccgtcggcgactatgacgaagccaaagccgccgccctgcgctaccgtgagattttcggcgaggacaatttttacctcgaattacaagaccacggcctgcgcgaacaggcacatatcaacccgcaaataatccgattgtccaaagatacgggcattccgctcgtcgtgacgaacgactgccactatatcgaaaaagaagacaccaaaatgcaccacatcctcgtctgcatccagacgaaccgcacggtggaggatgaggatacgttggaattcggctccgatgaattctattttaaaagcgaagacgaaatgcgtgcactgttcccggattgtcccgaggcagcggacaacacgcagaaaatcgccgaccgctgcaatgtggaatttgagttcggcaaaacgaagctgccgcgctttgatacgccggacggcagcgacaaccgcgaatatttccgccgcatgtgttacgcgggtctgcacaaatactacggcgaaaacccgaaaaaagaaatcgtagaccgccttgaatatgaaatttcgacgattgatacgatgggttatgtaaactactacctcatcgtgtacgatttcatccgtcaggcgaaaagcatgggtatcccggtcggcccgggcagaggctccggcgtgggcagcctcgccgcatactgcatcggcatcacgggcgttgacccgctgcggtatgacctgctgttcgagcgctttttgaatccggagcgcgtcagtatgccggacttcgacgtcgatttcagcgacgagcgccgacaggagatcatcgagtatgtcacggaaaaatacggcaccgaccacgtggcgcagatcgtcacgttcggcactatggcggcgcgccttgcgatacgcgacgttggccgcgccatggcgattccgtacacgacgtgcgataccgtcgcaaagcttgtgccgatggagctcgacatcacgattgatgccgcgctggaacgcgtctctgagctgcgcgatttatatgaaagcgacaaacaggtgcacgagctcctcgacatggcgcgcaaaattgaaggcatgccgcgccacacgtccacgcacgccgccggtgttgtcatcacagaccgcccggtcgtcgattacgtgccgctgagcatgaacgacgattcgcctgtcacgcagtacacgatgacggccatcgagcagctcggtctgctcaagatggactttcttggcctgcgcaacctctcggttatcgaccacgccgagcagatgattgcgaaacacacgccgggctttaaggtggaaaacgcgccggataacgacccggacgtgtttaaaatgatcgcgagcggtgcgacagagggcgtgttccagtttgaatccgccggtatgcgccgtgtcatcatgcaatccgaccccaaaagcattgaagacctcatcgccgttatctctttgtatcgccccggcccgatgaagttcatccccatgtacgtcgaaaatcgcaagcacccggataaaatcacgtaccgccacccgcgcctttccaaaatactggatgtcacctacgggtgcatcatttatcaggagcaggtcatgcgcattttccgcgagcttgcggggtattcgctcggccgcgcggacattgtgcgccgcgccatgagcaagaaaaagcacgatgtcatggagcaggagcgcgagtatttcattcacggcttaaagcgtgaggacggcaccgtggagattgaaggctgcatcgcccgcggcgtggacgagcagaccgccgagacaatctacgatgagatgaaaagcttcgcgtcctacgcgttcaataagtcccatgccgccgcgtatgccgttgtggcgtatcgcacggcgtacctcaaatatcattatccgaaagaatatatggccgcgttgctcacaagtgtgctcgcatccgcaggcaagattgcggcgtatatggaagaatgcagcaggctgaatattgccgtgctgccgccgcacgtgaacgagagcgagcagggcttttccgtttacgagaatagcattcgtttcggtttgctcgccatccgcaacctcggacgcggcctgatacagcgcattttgtccgagcgcacgatgaacggcccgttcacgaccttctacgatttctgcaagcgcatgcagggcagagacctgaaccgccgcgccgtggaaagtcttatccgctgcggtgcgtttgacggtctcggcaacaaccgccgcgaaatgctgatggcggtcggcccgctgctcgatcagctggaggacgataagcgccgcaacatagagggacagatcggcctgtttgacttcggcggggaggagaaaacggaatctttcgagatgccgaaagccgaggagttccccaaaaccgaactgctttctatggaaaaggaagtcaccggcatgtacctttccgggcaccccatgtcgccgtatgcggaggtctataacgccggcatcgccgcgcgctttgatgagattgcgcgcagcgccgccggggaatccgaccaatataaagacgagcagtatgtggacgttctggccgttgtggaaagcgtgaaaaagaaggtgacgcgctccggctctgccatggcgttcgtcacgctggaagacatgtacggctctatggaggcgcttgttttcccgaaggttttggaaaaatacggcgacctttttgcgccgggcggctctgtttgggcgcacggacgcatcagctttacggaagaaaaagacccgaagttcatctgcgaatatgcctcggcaccgttttcgccggaagaaatgatgatccgcagaaggcctgcgcctgaggaaaagaaaagggactcgcaaaagcctgccgctgtgccggaaagcgtcacgtcgccgcgcggggaagagcggcccggtgtgcagattaagggctataacacagcctataagggcctttacctgcgtgtaccgaacgccgaagacccgatctgcaaaaaggcgatgcagtacatcgagattttcgacggcgtgaccgacctctatctatattatacggacacgaaaaagctggtccgcgcgcccgcccgttaccgcgttgcggtgaactacgagctcgtatccgcattgaaaaaacttctcggcgagggaaatgttgcgctgaaagaataagaaattctcaaaaaaacaaaaaccgattcaaaaaagacaaaatacctcttgaaaccgtcagggaaaaggggtataatcaaaaatgaatggaataaattgctgaattgcatttttaactttgcaattttcaataagaaagtggaggaatttacaatgtgtgcaaagaaaatcgcagtacttacgagcggcggtgacgcaccgggcatgaatgctgcggttcgtgctgttgtccgcaccgcgatctccttcggcatggaggtatatggcgtacgtcacggctacaacggtcttctgaccggcgaagtgcagaaaatggagcttcgcagcgtttccaacatcatccagcacggcggcacggcgctctttacagcgcgcagccccgagttcaataccccggagggcgttcagaaggcggctgctaaatgtcgcgaactgggcatcgacggcgtggtcgtcgtcggcggcgacggttctttccgcggcgcacgcgacctgaccggcgcaggcgttccttgcatcggcgttccgggcaccatcgataacgatatttcgagctccgaatataccatcggttatgacacggcgatgaacaccgctatggaaatgatcgaccgcatccgcgataccacagagtctcacgaccgctgcagcgttgtagaggtcatgggcagacgctgcggcgacatcgcactcaacaccggtatcgctgtcggtgcaatcgcaacgctcgtcccggaagtgaagtatgactttgaaaaggacgtcatcgagcgtatccgctacgcacagaagaccggcaagcgccacttcatcgtggtcgttgcagagggcgtaggtcactccgaagatatctgcaagcgcatccaagaggagaccggcatcgagagccgtgcgaccatccttggccatgtacagcgcggcggttccccgacgctccgcgaccgtgttgtggcaagccggatgggctaccacgcagttgagctgctccgcgacggcaagagcaaccgcgttgtcgtcatgcagggcgaacgcatcgtagacttcgacattaccgaagccctcgagatgccgcgcgtcttcgacgagaagctctacaagatctctcaggatctttcccgctaaagtttagtcatcgaaacgcctgttccaaaaggacgggcgtttcctgtttttcggcacggtgtctgcattttttgcataaagcaccttgtcaggggtaaaaaataattatttttgggaaaataggttgacattttccgtagttcgtggtagaataatcgagcggtcaaaagaggccgcgagataaataggggcatagctcagttggtagagcagcggtctccaaaaccgcgtgccgtgagttcgaatcttactgcccctgccaccatggcccggtagttcagttggttagaacgctagcctgtcacgctagaggtcgacggttcgagcccgttccgggtcgccacaaaaggcgagttcatcttgtcttttgcgtatgctgctatggctcagtaggcagagcacgtccttggtaaggacgaggtcaccagttcgaatctggttagcagctccaagaaaaagtccagtgtttaagccgttttttggttttgacactggattttttatttcatgtacggataaacgtggaagccgacggatttctccacatgtgcccacagacgttggaatgcgcttagggtcatttcttgtccgtgcgacggtcgtgcggtcttgagagatctatgccggtctcgaaggcgcgttcgatttccttggctttgcggtttacctccgccgggcttgtgccgtagacgtgcttttgcgtgccgtccggcagcgtgatcttgcgctggtagcgcccatctgctcgttttttcataattttaaattgtacctccaaattttgggcatatttctattcacgtcctcaaaagaaaacgactaaatttgggcataaaaatgcccgggctattgcttttgcccgggtcaggtggtacaatattacttgcttggaatattattgttccaccggggtgacccgggcggcctcgtcggtgttggtagcaccgacggggctttttctttttagtatttcaaaatgtctttccagttttcggggaagcctatgttttgaagctgaataacatcgctatactcctcaaacaaagcgctcaattcgggaactatgtaatttgtccattcctcatgatcagaatacatgacgcacataatgaacacctggtcgaaaatgcgatttgttttttcacaagggaaggggtgatttttacattgcataggggagcgagcaaaatcatagtcataaatgcgcatattgtgtgcaaggtggttgcgcgtatatgtcaaattacgtatccagtttttcaattggtttggcccggtgccatactgttttgcgattttcttttgaagtgggcttatcaagttattatacaccgcgtgtagatttcccatagtgaacagctctactgcgacccacatcggcaaattcccgccgtatttctcaatatgatgctttacaaaaggtaagcccttatttttcttaacggcagagaaaaacaaactttgaaattccacaaaagaattatgattgcgataaatagaggcgttgaggtaaacaagagaatcttcgggatagcagcttgtaaccgtataagaaagccgtgtcttcagcgtttcttcaatgtcttccaatgcaaataaaagtgtttttgtcagtctgcggtcgaaatcataaatgcgcttgacttgtgcaaatgtgagatcctgcggatacatgcctgtgcttttatcgcggaaaccgaaaaggtagccggaaaaacgatagtagttgatgcagctcaaaatatacttagcctgttcatcatccgaaatcgttaatccgcgagattttaataatgaaatttgctcatcgaatgatgcatgcttttttaagtccttcataaaaagtctcctaaaatgaaatcgaccccgccatggtacgcatcgttgagaggcgcggcggggtctgtatcatgctttatattatattcagaccgacgtccaaagtcaacccttatggtgaaaatttaattcttttttaacttttatttgtggcgtaaaatatacgtccagcatctaaattatgcttgtattgacaagcagccgacgcatatagaatatcagtatgcaagcaatgacctgcattactgcattcaacgtattttgcgcaacaaccaaaagacggaaaactaaacgagcttgtatatatgcgattaagtagtttatgcacagcagaattattgagtgcaatatttaagaagtattcaatatcaatgcgaacaaaatcatctgatgcgattttcgtaaaaggaatattcagtgcagcaaaatctttttcaaatgttccactaaaagatatatactgcagttttccgctaagctttacccgagcaaataaatgagcacttgtgtccaaatgatataaacttggagtggattcgaccataagcgaatatagcccggttgttgcgcttttattgtagtaaaacttactgttgccaaaatactgtttgttgatggagtcctttattgtttgaaaaacttcttcgatcatatacttcctccaactcgtaggtctaaaaattgttttgcggttctttgcatttctttgaaaaaagcagcaagaactttatgtatttcattatttacttcaattatcaatacttgaatagttaaatactctgaatagccaataacacgacattcatataattctttttcagatggtacatagtagaactttttgctttctatattcttttttgcggcaattttccatgcagataaaagttcataacattcttcatccgatgaaaagtaagtaatattgtctaaattcaatggaattcctcctttaaaatgttgaatgtttcagaatccatcatatcataaaatgcgttttcggacaatatctctatgttggaacctgacaatttcaactgttcagcgcgcttttgtttgctactcttaccgtcttttattgtcttacaataatcagtatttccaagaacgagaaaatctgtttgtttagttactctgtcaccgcatagtcctccaagatttacaaccatttgcattgcctcttttcttgttttatgctctaatgtgccggtgaaaacaaaaatctttttaaaaaaagggctggtatcacgaggaacatctattgtaggaacaatatcttttgcacgaatagatgaatgcttgtaagttgtatgtgggtaaagagaagaaaacgatatattgttttctgcaagaaattttttaatgctttcgtagcactcatgaactttgatagcatcagacaaagctctatgttccacgttttctccaatcgaaaaccgtttagatacgtctgatagtctatgatgtttttcttctggaaatatgcgacgactaagtcgcatggtatcaataaaattgttggaaaaagcaacacctaaattgttaacacaagcatcataaataaaattaatgtcaaagtttacattgtgcccaacaatagtataattgcccaagaattcaatgaacttcgaaaaagttggtacaagggaaggtgccgatgctaacatttcatttgatatgccagtaagagtagctataaaaggactaatttcataccccggattaattaaagattgaaatttatcaataattattccgttggagacctttactgcgccaaattctataatgtcgtcatacgttgggtctaatcctgttgtttccaaatcgatagcaacgtagtcggaaacatcttccaataaactatttcccttgaattctcttgaacctttcattgaaaaatcctcccctaaatttagtatttatgccgagattcgaccaccttaccaagcacacgaacaggcacatctttggtgtcatagatttgcacttgatgcgcagggttcatgctttgaggggtcagcacgacggtattatccgttcgcgagaagcgctttacggtggcttcatcgccgtttaccagcacgacggcaatatcaccgttgtctacaatatcctgcttttgcacttctacgcatttctactgcacctgttcataggtttcgcagccgagatcatgcagtttcttatccagaaaagcatttttctgtatcaagaaattattctgcaactttaatgcttcgttttcctgccggattttaccagcgcgaaaaatatcaagtaaatccataaaatatacctttcttttattcaattatattttcctgcacagtcccacggctttgccttctatgattgcggtgttcatttcctcgccaatcagcacgatagggggaaaagcgggattttcgggctgcaggatgagcttgtccggcgagtagtaaacgtgcttcagcgtggcttcatcgccgatgcgcacggcagcaatttcgccattttcgacgctcggctgcttgcgaattgccacaacgtcgccgtcctgaatgcgcggcaccatactgtcgcctgcgcagatcagcgtgaattgtgcgccccattccgtcggcacgcggtcatagtcttctatgttctgctccgccaatatcggctcgccgcatgcgatttgtcctacgcgcggcagcagctccgtctccgggaggggctgaaagcccggcgggacttgaaaagtagattccttcgtgtcccatcccattaagtattcaacagaaaccccagtggcttttgctatcatttcaagtctgtcaatcggtattttctcggtctcaccggtagcatatctttgtagagccgattttggaataccggttagttcgtggagaacgccataagataatttagcgttctggatcgatttaagaatacgttcagatcgttgactcatgttctcacctcgttgcactcatcataccaccatcgtcccaaataagcaatactttttcaaaaaatattttgatattgtcccaaaatagggttgacacacgcaaataaatgtgttaagatttaatcgtcccaataaagggacaaaaggaggtggtgaagtggtcagtaaaaatcttcttcgatcgagaattgcacagaatgcacttacgcaaaagcagcttgcagaactcatcggcattagtccaaactctttttcttcaaaaatcaacggaaaaaagccttttaataccgatgagatcgataaaatctgcgcagtgctacatatctcgaacaatatcgagaaggcaaaaatttttttgtaaaaatcgtcccatttttggaatgataagagatgcagaggtgagaggaggggagagaatgcaaaccgaaaccaaaagcaaagccttacattcggttttcatcgatacggaaagcaaaacgtatcttttcgacggaaaaccgatgcaaggcatgttagggcttgacctccacatagagcctgataacaactatgtgacgattaagtattgtttagagtgccggcaagtaactggttgattgcagcggtagcgacgccttctgctatcgaagaaatggtcttcaacgcaaagttaccgatagattcacagccactttttataattttccatgatttgggactgcgaaccgtttcgagaaactgatgtccggcataggtaatatcacaaattttgataactctgtcatatccatcagaaggataatttcggacaacagcttttataaagccagcttcgtttagcttaaggcaagtgtacatcacttcgttttcggagtatttttccaaattttctgcaatgcgctctacataagcatcttcgccataaggcacaggttccaactctaaaagaaccgcacgtatgcaatcgggatctaacttcatggtttgtcacctcctttctaagattatcttatagcaagattgaataaaaatcaagcgacggaaaggagcctcgccaccggcatggagttggcggcgacggagagcggtagcagaggtaaagagtgagaggaggggaggaaatgtatcgactattagatgtactcgagtttattgctttaagctttattatgtttctgattttaagaaaattgctgtaatcagagaatttgaagcagtaagcgatagacgatgaaagcaaagaaaataagggcgccggatgagaccaaaagtctggatatgtacaaagacagaaaaaagacttgtacaccacgagaacggttcagtcgatagtcaatagggcgaagtggtaatccaagtttccgcgtacataaatcgtattcgaggtcaattttccgcgacatcgatttgaaattggtcttttcatcttgagcaaagcaatgcagcaagcgtcctccggcaatcatacgatttttgtcgacaattttacggcattctttaacaagtattaaatcttcatcagaaagatttttcttgtagagaatagtttccagtttatcaaaaatcgggaacacgaccttttcatatctttcgcgctcataacttccaggatgtctttcaatgagatattgcgtagttatggcaataaaaatagggcttataatcatagccaaaatatctttaaactcgatggtaaagtctatattcatactaaaaatctccttttccttccatattaccacaagaaacggagatgtacaaggaaattgacctaacccccccgcagccttgccccatgccgcccggaacttacctcccatgatttcattttgtttgcgccgaagtgattattttcttgtcattgaacgggcggcaggtgggagggctgcgggagagaacaaaagaaaggagtagaaaaatggaacagtattacacgctgcaggaagtgatggcgcgactgaacatctcgcgcgatacgattatggggcttatcagaaaagggaagattcccggcacgatcaagctcagcaatgttttccgcatcccggaaagcggcatccagcgctttttggaagcctagaccatgcagccgcgcaagccgttctacgtgccgcgccaacgcaaacagaccaacagcaagacgccgggcacggcgaacgcaggttgggcgccgctgaccatggacgtattcaagaaagggtgattttatatgatcttagtcaagctgctcggctttgcgatgctgatcgggacggtcgcggggtccgtgctcgggctccagatcgttatcgaccggctcgtcgccgcgcagcgcaggaaaagaaaagccgcacggtcgtatccgtaatttattacatggctcagaagcaaaaactttcgaccgataagctgacagaaatcgaaaataaggccagaaaccacgccattcgccgcgtgctcaaggaggagctttaatgaacaccatcgacacaagagaagcgggcgggtgcttctgccgcagccgtgaccgctttgagcgcgagtttatccgcgccaaaaatgccgatgcaaagctctatttgctcattgaaaacggcacatgggaaaaggcgtatgcgggcaagtaccgcagccgtatgcagccgaaggcgtttgtcgcgagccttacggcatggcttgcaagatataactgccagatcattttctgcgagcccgcaacgaccggaaaattgatccgcgaggttctctaccgtgagctgaaagaacgattggaagtgatggaatgcccgcaagccataacggattcgtaaaattcgaccgcaaaatgaccgaatgggagtggtacagagatgtgccgacaaaagtgctatttatccattgtatcttttgtgcaaattggaaaatcggatgtgtaaatggcacaaaaattaagcgcggacagttcgtaacttcgttagcaaaattgtcggaagaaatggggctcacaattcgacaaacacggacggcgctcgaacacttagaaatgacaggcgaactgacaaacgaaacaagcgcgaaagggcgcattattactgtaaataattacagtttataccaagatgcgccaaagcgaacgacaaacaaacgacaaacgtcaagcggaagaaacgacaaacgaccgacaactaatgaagaatataaagaagacactacgtgtctaaaagaaaaagaagaaggcggctgcgccgcaaattgcccttcgggcgaagcgttcccgtacgacgagggcaacctgacagacgcctactacgcggagagggggatctgacatgccgtatgaattcaagcggtcggacgtttacggtctggcttcggcgctgggtgcggaaacacatgagcgcggcgaggagctgtttttccgctggtgcccgtactgcaagggcggcggacacgacaagaacacgttttcggtcaatctggaaaacggaacgttcaagtgcttccgtgccgggtgcggggcgcaggggcatctggtgcagctcgcccgggacttcggttacccgctggagtttgatgatggccgaaagaaaaagtaccgcacgctgccgcagcgccccgtaaaggtgacaaaccccgcagtacggtatctcgaaagccgcggcatcagccgggcagtgacggagcgctaccgcatcaccacgcagcgcgggcacgataacattctggtttttccgtttaccgatgcgattcgaccggcgcgaagaaaaacgccggtacatacgccgcgatcgagatcaaagcgtcgtacagcgcaattacgggcaataccgtaacgcttaaggcggcgtataagctcacatcggacgcgagctacggcaacgatacggtcctcacgaacagcggcaagacggtcatcggcggtgccctttccgcgtcgcacacctacgacgtgcgcatcaccgtcgcggataagttcaacatcgcgaccgttgccgccagcctgcgtaccaaaaacgtaatttggagcgtgctgccgaaaggtctggggtttgcaatcggcaaagtggccgagcttgcaaactggtatctctcttggctcgatgcgccggagacgcgggcaattcccgcaccgccggtgtggctggataaactttaaaatttcaaggaggcaaaaaaatgaacaaagcaactgtacttaaatccgtaacggcagtcgttggggcgggggtcacgatctggctcatcatcaacgagctgatctcgattctggagaaccttgcggcaattggtgtgccgggttttccacggctgtctaaactgttggagagattgaagaataccgtaagtaaaggagataatgcagatgaaaaataatcatgaaatcatcctcaaacaatacgccgcgtactgcaaggagcaacccttatatcttggcacggcgggcagctacggcatggagatgctgacgatcattcgcgagggtgtttgggcggagtacgatattttagcggcgtttcacccgccggtcggagctgcggtgcaggtgcgcgtcggcgcgaacaatcaaatcggcgtgccgatcgaagccacggcggaaaagggcatgggcgagatcgtattcgcgggctacaaggagggcgtgcgacagattgcggttgacgtactgtacaaggtggcgccgtcctctggtgcgagcggcacagaacccgccgagcctacgccggacgtggtacagcagattttgtcggcggcgagtaatgcagagaagattgccaagagcgtccgtgcagacgcagaaaaaatcaaggcgcggcttgacgaaatacctaaaattgacgacacagccatcaccaccacaagcctatggagcagcaagcagatcgtggacaccttatgtcctccaatcgaggagaccggaaaccccgttgtgtgctatcccgtggcaggctatccgcttggcgtgaaagcgaagtgggaacccgtgcaggagggaagcggaacacccagccccgaaaacattcgccccatcaagggcagagacagcgtgacgattacccggcaggaggataatcaagtgattacgctgaccctgcccgaaaccgtgtatggcggtgaggtggacgcggtgacgggagagggcataaacgaatggaaatcaattacgctggatggaacggaaacgtggagttatgagctgacaaacataagcggaaaagtcgggtttttattacgtgcaaaagatattcaaacgccgactacgccagaccagaagggacaaatcgtgtgcaacaaatatgtgacgcgctccgctaatgatacttacacaaccaaaaccggaataagtattgaagctggtaataataaatattttagaatttacgatgaggtgcatgcggataaagacgttgcttcttggaaagcctaccttgccgcccagtacgccgccggaacgcctgttcaaattgcttacaagctgaaagagcctgtaccgtttaccgcggcaggcgcacagcccatccccgcgttaagcggcacaaacaccctgcttaccgacgccgacagcgtaagtgtatccggccgtgccgacctaaatcacatcataagaaaaatgcaagaaaaatgaaaaggagaataaaaatggtaccgatcaaacaaaatttacttagccagagcaaatataatttgaaagtgccggtggagtcctgcgcgaaggacatgaagtatatcgtcgtccataacacggcgaatgatgcttctgccgcgaatgaagtcgcgtatatgattcgcaacgacagctctacgtcgtttaacgcggcggtcgatgacaaggagattgttgtcggtattccgctcgacaagggcgcattcgcagcgggccaacgtgatggcaatgcacatggtattcatatcgagatttgctattcgctttcgggcggcacgcgtttcgataaagccgagaagaacgccgcagagtatatcgccaagctgctcaccgagcgcaagtgggatatttcgcacgtgaagaagcatcaggacttcgacggcaaatattgcccgcaccgcacgctcgacaagggctggcagcgctttttgaacatggtgaaaagctacatggaaacggcaaaaacgcccgttgcgagcaagtttaccccctatcttatccgcaaaaactgccgtgacccgctgaacatccgcaagggtccaggcacgaactacagcgtgcagggccagatcaaggacacgctgcgctatacgattgttgaggagcgcagcggccccggctccgccaagggctggggccgtctcaaagccggcggctggatcgcactcgactgggtgaagaaggtctaaaagtaaatacataaagcaaaaggcgcagggcggccgggatttccgagcgggctctgcgccttttttttattttcagaaaaacagcgccccaggtcggaaggacttcgaccgtggggcagcttgatgagcggggcaataccggcgaagtgcttgatgagaggtatagggttattgtggcgttttagcgcgggtagtcaaaaaagtagtcggcagtatatcatttttgaagaaaaacggcctttttgcgcctatttataatttcgacttgaaatttaccgtatttctgctataatctttatagttatccctttatgtttatgcttaaaaagtggtggccaaactgccagaaaattaaaggagcagaggattatgagtattccagaaatggacatgaacccggagatcgcccgaaagttactcgaggtcggcgaagaattccgcattgaaggcccgttcttctcgtacgaagaaatcaaaatgggcaacgtgaaccacacctacaaagtcaattatattcgcgatgacggtaccggcatggcaaagattaagtctttccttgtacagcgcgtcaatacatatgcgtttcagcacccgattgagctgatgcagaacattgaccgtgtcacggagcacatccgcgaaaaatgcccgaatacgaaaagcctgcatttccatcacacgaagcacggcgtcaactatttgatggataatgacggcttctggcggctcagcaactacgtgccgtctgtgacgttcgatacctgcgacgacctgaacgtggtgcgcagtgcaggtgaggcgttcggcgatttccaactgatgttggcagatttcgatgcgaactcccttttctacacaattccggacttccacaacacgcgcaagcgctatgagaagctgaaggaagacatggcggccgacccgtgcaatcgtgtggcagaggtgcgcgaagagctcgattggctgctttccgtagaggacgaggcttgccgcctgaccgacctctttgaaaaaggcgagcttccgctgcgcgttacgcacaacgatacaaagatcaacaatgtgctgttcgatgagaagacgcacgaggcgctcgttgtcatcgatctcgataccgttatgccgggtcttgtcggccacgatttcggcgatgccatccgcttcgctgcaaattttgtggaagaagattgcgattatccggaaaaggccggcgtaaacctcaatattttctgggcatttgccgagggcttccttaaaaagaccgccgcgtctctgacgaaaaccgaagtggatacgctggcgctcagctgctttgcgcttacctgcgagcttgcaacgcgcttcctcgcggactacatcgtcggcgataagtactttaaggtcaaaaagccgcagcataaccttgtccgtacgcgctgccaggttgcccttgcaaaggacatgctgaataaaatggacgcgatgaacgccatcgtgcaggactgcgcacgccgctacaaagagaccgaaaacgcataattcattttgcatccagacgacccggcagttttgtcgggtcgtttttaaaaccaggggggagtttatcatgaaaattctgttgaccggcgcaaatggctttgtaggggcacgcatccgtgcggcggcgcccgttatttgtgcgccgtctctgcgcggggcggaaaaagaggatatcgaccgcctcatcgacaccgtgcagccggacgtcatccttcacaccgcggcaatctcggacatcggtgcgtgcgccaaagacccggaaggatcctaccacgcaaacgttttggtgccggagtatttagccaaagccgcaaacggtgcgaagctcgtgttgttcagctccgatcaggtgtacagcggcgcaaagggcgataagccgtttacggaagacgacgttacggccgcaaatctctacgccgaagagaagttggaaatggaaaaccgcgttctcgcgatcgacccgaacgccgtcatgctgcgtgcgacgtggatgtatgacatgcccatgttcggcgtgccgaaccgcagcaacctcatcacgatgttcctgaacgccgccatcacccaaaagccgcttgcactttccaaagaggaatttcgcggcatcacctatgtgcgcgaggttgcagagcagaccttgcaggctgtgaacttgcccggtggcgcgtataacttcggcagcgaggcagacgtctccatgtacgcgcttgcggagctgtttatgaaaaaaacaggcatgaagctcaatttgcaggaaaagtccggcggcgaaaacctctggatgaattgtgcaaagcttaaaaacgccggcggtggatttgagacgaccgccgaaggccttgcgacgtgcatggaagactataatctttcgctgctcggccaataacaaaacgaaaatctcctttgaagcccggttttatgggttcttcaaaggagatttttaatggttcgaaatctaattatgtcaatagccttatgtaaactaaattatgtaaaattaaagaaatttgtcgagcgcatgggcgcgttcacaggccgcacgcaccggttccggctgcatgcgcagcacgccgggctcgcccacgacctccgcagagctcggaatccttttgcctcacaacagatcaggaagataggctaaacggtccggtggactgtttagccgtaagaaaccctatcaagaggtcccttaaaaagacatgaagaatgcaaaaagccacaagctcaaaagtgtcatttaaccccccttcggcataacttgtacaagggggaagtccccgaaaacaaggaggggttttatggcatcttttacaaatttcgcgacgctttcgtataacggaggcacaacgaattccaacaccgtcacgggcgagcttttggaggccttgaccgttaccaaaaccgccgtggtgaaaaattacgccgcaaacgataagattacgtatatcatttctatcgtaaacagcggtgcgcagccggtgacaaatctcacggtcaccgataacctcggcgcgtatgaatttaatagcgggaccgtctatccgctcgcgtatgtgccgaattctgttcggtattatgtaaatggcgtcttgcagaccgcgcccaccgcaacgccggagccgccgctcgtcattacggtcccgaatgtccccgcaaacggcagcatcatgctcgtttacgaggcagaagtcacagcgtatgcaccgctcggcacggacggcagcatcacgaatatcgcaaatgtcacggacggcaatctggaagtcagcgcgtcggaaacggtctccacggatgatcgcgcggtgctcaccatcagcaaagcgctgtgtcctgcggtcgtcacggggaacgggcagattacgtatacgttcgtcatcgaaaacacgggcaacaccgaagcttccgaagccgagcgcatcgtgctgaccgatacgtttgacccgatcctcaaaaacattgcggtcacgtttaacggcaccgcttgggcagcaggtacgcagtacacgtatggcgaaacgaccggcgtgttcgcaacgcttccggggcagatcaccgttcccgccgcgcagtatacgcaaaacgaaaacggcacatgggccactacacccggcaccgcggaggttgttatcaccggcaccgtgtaaagcaaaattcagcaggacgcatagcgtagatatcctccggcttttcgccgggggatattcctgctttgtgtcgttttttaacaagcgattttacatggattttacaaagaacacgcagttgatttgacatagacacgatatactcctatacgtgtaaaagaatgttaaaaggggaaaatcgggtatggatattttcaatgtactgacgatgatcggcgggctgtgtcttttcctgtttggcatgaacctgatggggcaggccttggagcgccgcgcgggcggcaagctgcaaagcttgctcgataaaatgaccggcagtgtaccggcgggctttttgacgggcctcggcatcacagccatcattcaaagctcgtcggcgacgacagtcatggtagtgggcttcgtaaactccgggctcatgacactgcggcaagccatcaacgttatcatgggcgcgaacgtgggcaccaccgtcacggcgtggctgttgagccttgcgggcatcagcggcagcaatatttgggtgaatcttttaaagccgtcatccttcacgcctgttctggcgctcatcggcatcattttctatatgttctgcaagtccggtaaaaagaaagataccggcatgatcctgctcggctttgcgaccttgatgtttggcatggaaaccatgagtggcgcggtttcgggccttaaagatgtcccggcgttcgcttcgctgttcctgatgttcaaaaatccgattcttggcgtgcttgcgggcgcgcttttgacaggtatcatccagtccagctcagcttccgtgggcattttgcaggcattggccgtaacggggcaggtcagctacgcggcggctatcccgattatcatgggccagaatatcggtacctgcgttacggcgctgatctcctccgtgggcacacagaagaacgcaaagcgcgcggcagttgtccatttgatgttcaacgttatcggcgtggtcgtgttactgacggccttctggattgtaaagatcgtatttgcaccggctgttctggatgaaaacgccaccatgtccggcatcgcgattgcgcactcgctctttaatatcctgtgcacggcgatgctgctgccggcaggcggcctgcttgaaaagctcgcaatccgcatcgtgccggataagggcggcaaagagcagcctgttgagcttgaagaacgtctgctcatcacaccgtccgtcgcgctcggccgctgccgtgccgttgcgggcgaaatggcacgctgcgcaggcgaagcgctgcatatggcgctgacgacctttgaaaattattcgccggagcttgcggaatccatccgtgaaaacgagagccgctgcgaccgctacgaagacgagcttggtacatacctggtgcgcctgagcgcccagcagctgagcgatgccgaaagcgaagaagccaccgaattattaaaaattatcggcgattttgagcgtatctccgaccacgccgtgaacctgcttgcggcatcggaagagctgcgcagcaagggacttggcttcagcgccgccgcagaaaaagagctgaaggtgctcatcggcgcggtgagtgagatattgaatacggcagagcgcgcgttcagcgaaaaagaccttgcggccgccgcacaggtagagccgctgaaacaggtcatcgttgcattgaaggagcagatgcgcacgcgccatattctgcgcatgcagcagggtcattgcagtattgaagcgggcttcgtgtggtccgacctgctgacggatctcgagcgaacggctgaccactgctccaacatcgccggctgtgttctggatgcggcaaaccacgggcttaatctgcacgaaacgctgcgcgccatgcgtgccgacgaccccgacttccgccgcgcctacggcacctacgcggaaaaataccgcttgcaggcagcataactacataatcaatcaagtaaaaaggagacagtccgctttgatatgtaccccaataccggacacccggtatgggggcatatcactttagactgtctctttttgtatttgatgaagttgctgagaatgctgatttagaggttgtaacggaatagagcattttaagacttggactggcgtgcggaatcgtatttggaattacccaatgctttgaggtaggcgtcgtaagccttttccaacgaaggaaactgttctcctttttccaggatttgcttatactggctccgcgtaagcgattccgagatggtgacatatttcttgccgtttcgcgtaccggtcttggtttcggaaacataatatttcccgtcaccggtttgaataattacggggattttctgtccgggcccgacctcattcgtatttagagatgtccagaaaagataccgatttgcttcttgtccgtctcttccgttgccaagataggcccatgtgcaatcatcttgctgcaaaagactgttattcagcttattaatctctgcggtaatggatggaacatatttcgaatccagacatctggagtcaaactcaaagtttgtattgtttctcatgtcttgccaaaaatccgtattgtatagaggtgagaagaaattcgtctcgtttgtgttaaacgggtatttaggtgtagatgggtcggcttttccgctccaagtaagaatgattccgtaatcttccttatacgatacgacacaggttccgtttggcgcagcaacgcctatccagttctccgtgtctccttggcttttggaatgaacaataccgccgatattcacaggatctactgattgccagtcggcctgcttctgttttaggttgacggttacggtagcctcggaatctccgagcaacgcctctgtggacacctgtgcataagcggagcggacatttgcaagatctgtcgcttctctggttttttcaagctgtgacgcaaataccggaattgcaactgcaatcaatacggcgatgattgcaatgacaattagcatttccatcaatgtgaatccgtttttgttttgcttcattaaaatccctgctttatcattgaatagaacaaatacatggtgaaaataaacatcggagttcatcaccgaaggtctctgcaatattttccaccggaaaggatttctgcgaaaaaaagatgatgaaatcgtatggtaaagacccatggaaaccaaaacctctgtaataaaggaactggacaccaatcaagatacgcgttgtatcaaaattggtgtccagttatggtccgagtgacaggagttgaacctgcggcctcttgaaccccattcaagcgcgctaccaaaactgcgctacacccggataacgaatttattatacacgatgcccgggaaaaaagcaagcagttttttcacaattttatgcggaagcgaaaaatagaggaaagcggctttaaatcagactcagaaaatagcgaaacagcttttcgccgttcactgcatcggggcggcggtgcgcaaagccgatgcgctccgggtgaaactgcacgccgatcaccttgccgttttcatggataaagccctcgttgatgccgtcgtcgctgacgcacagggggataagtcccgcgccgagcttacctgcggcctgatggtgtgcactgttcacggggaattcttcgccgtaaaattcgcgcatcagatcatgctgcgcgcgtaccgtgtgaatggcgtcgccggtctcttttgtcgccatgtggtgctgcgggtccggcacatcctgaatgaggtcgccgccgaatgccacgttcagcacctgatgccctctgcaaatgccgaataccggcttgcccgctgcaaaaaagcattttgcaagcgcaatctcgtctgcatcacggctgtcatcgatgccttcgctcgccgtgttttcctgcccatagagtacaggatttacatcggcgccgccggggatcagcaggccgtcgcaagtgtctgcgtcggaaagcgtcatcgagattaccggctccgcgccgcaagccgtcagcgccgccacataatttgcaaaatcgccggggttgccgcgcataaagatccttttcatcaaggtcactccttcaaaatgaaaaaaagatgaaaaaaacaatttagaaactatggattagtataccagttatgtggtatacttgcaatagaagatacgaaagaaaagggagcatgaacgtggcaaagcacatggcggggccgcaaggtggacattacagattaaaacagccgcaaaaacggaagaagcataacaggattcccgcacgtgtactgaaatcgcgtgcacggcttttgcttagtggggcagggtgcattgcggctgtgcttatcatcacagcgctgcttgccatgccgcatcaaaatgcagagcccatagaagctgctgcctcgccggaagcggcaccgagcaccgctgcggagaacatttcagacaaagcaagtgtgctttctaaaacgacctccgctcccgaatctgcctttcagcagctcggcgattggcggcttgtgcttgtgaacagcgaagtgccgctgccggacgatttccaaatgaccccgacgctgttcgataccatcaccgtcaactctaaaatgtacccggagcttacggcgcttatcaatgcagcgtataacgacgagatcaatttgtggatcgcctcgggctatcgcagcgtggaggagcaggaaagcgtgctggatcgcgccgtgcagcgccgcatggcagacggcatgacctatgaaaaagcgtatgaagacgcgcggatcaccattcaggcgccggggtacagcgagcatcacaccggccttgcggtcgatttcaacgatgttgaagacgatttccgcgagacggaagcctacacatggctgcaggagcacgctgcagaatacggctttgtcgagcgctaccccaaaggcaaggagagcatcaccggcatcgattacgagccgtggcattaccgctacgtcggcaaggagcacgcgcagcgcatgaacgagcttaacatgtgccttgaagagtacgtggcgttcctcaagggcgattaagaacagaaaacgggaaaaagatggcgctttttcccgtttttttattgcaaaattttgcgcacagatatataatagaacattatatgatggtgtagtattttttcatgccggcggcatggatagcaacgcaccgaaaaaccaaggaggttgttttaatggttcgcacacgctttgcgccgagccccaccggtttcatgcatgtcggaaacctcagaacggcgctgtacgagtatctggtggcgaagtcccaaaacggcacgtttgtgctcagaattgaagacacagatcaggagcgctatgtagaaggcgcaacagacgttatatataatacactgcagcaagtcggtctgcagcatgacgaaggaccggacatcggcggcgaatacggcccgtatgtacagagcgaacgcaaggatatttataaaccctacgcagagcagcttgtgcgcgagggcaaggcatactattgcttctgcaccaaagagcgcctcgagtccattcatcaggacggcgagttcggcggctacgaccgtcattgccgcgacctgcccgcagaggaaatccggaagaacctcgacgccggtatgccgtatgtcattcgtcagcgtgtgccgctcgagggctccacgtcctttgaagacgccgtttacggcaccatcacgattgaaaacaaagagatcgaagatcaggtgcttttaaagtccgacggctacccgacctacaactttgcaaacgtcatcgacgaccacctcatgcacattacgcacgtcgtgcgcggctgcgagtacctcacctctacaccgaagtacaacatgctctacgacgcgttcggctgggaaaagccgatttatgtgcatctgccgctcatcatgggcaaaaacgaagacggctccgtctcaaagctttcgaagcgccacggttccacaagctttcagggtctcctcgaagacggctacctcgcaccggtcatcacgaactacatcgcgctgctcggctggtgcccgaaggataaccgggaaattttctcgctgaaagagctcgaagaagcattctccattgacggcatcagcaaatcgcccgccgtgttcgattacgataagctcctgtggttcaacggcgaatacatccgcaagatgagcggggaagagttccgcaccgcggcgatgccgtactacaaagagattttcggcgacgcagaaaagccgtacgacgtgctcgacgccattttgcagccgcgtattttgaagtttaaggaaatcccgagcctgctcggcttcttcaaagagcttccggaatattccgcagacctcttcataaacaaaaagagcaaggcaacgctcgagaacgcgcccgtcatgctgcgtgccgccatcgagacgctgtccgccatcgaaaactggcaggttgataccatccacgatgcactcattgccctcgcacagagcctcgaagtgaaaaacggcactctgttgtggccggtacgcatcgcggcggcaggccagaccgttacccccggcggcgctatggaaattctcgccgtgctcggcaaagaggaggcgctgcgccgtttacagctcggccttcaaaagatcgagaacgcataaagcaagaggaaaaacctgatattaggaaaggtatggacaaattatgagtgaagagatcaaaaacgaagcggtctccgaggagatcagcagcagttttatcgatgattttattatagaagacctcgcagagggcggccgctgcgaaggcatgaaggtgcacacccgcttcccgccggagccgaacggctacctgcacatcggccacgccaaggcgatctacgtcgatttcggcaccgcagagcgctttaacggcatctgtaacctgcgcatggacgacacgaaccccacaaaggaagacgtagagtacgtcgatgccatcaaggaagatattcactggctcggctacgattgggaagaccgcttctactatgcttccgattattttgaagatatgtacaacggcgccgtagagctcatcaaaaagggtcttgcctatgtttgcgagctcacgcctgaccagatgcgtgaaatgcgcggcgacctcaccaccccggcgcagagcccgtaccgtgaccgtccgatggaggagagtctcgacctgtttgcccgcatgcgcgccggcgagtttgaagacggcagaatgacgctccgtgcaaagattgacctcgcttccggcaacttcaatatgcgcgacccggtcatctaccgcatcaaccacatgccgcaccatcgcaccggtaccaaatggtgcatctacccgatgtacgacttcgcgcaccccatcgaggacgccatggagcacatcacgcactcgctgtgttcgttggaatttgaggatcaccgtccgctgtacgattgggttatcaacaacgtcacgctgcccgcaaagccgcgtcagatcgagtttgcccgcctcggcatcaacaacaccgtcatgagcaaacgcaagctgcgcgcactcgtcgaaggcggttatgtcagcggctgggacgacccgagaatgcccaccatctgcggcctgcgccgccgcggctacaccccggcctccattcgcaatttcagcgtgcgcaacggtgtttccaaggtgaactctaccgtggagtacagctttctcgagcattgcctgcgcgaagacctgaacctcacggcaaagcgcgtcatgggcgttctgaaccccgtaaagctcattttgacgaactatcccgaagataggaccgagacgttcgaggtcgagaataatccgaaccgtcccgaagacggtacccgcacggttacgttcggccgcgagctgtacattgaagccgaagacttcatggagacccctgtaaagggctatttccgccttttcccgggaaatgaagtgcgcctcaagaccacttatgttgtcaaatgtaccggctgcaaaaaagacgaaaacggcaacgtcgtcgaggtctacgcggagtatgaccccgagtcccgcggcggcaacccggcagacggccgcaagatcaagagcacgatccactgggtggacgcgaagaacgccgaagacgccgaaattcgcctctacgataacctctttactgtggaagacccggatgcaggcgatttcttagagcttttaaacccggattccctcaaggtcctcacgggctgcaaggtggaagcgggcctcaaaaccgcgaagccgggcgagagcttccagttcatgcgtcagggctatttctgcgtggataacaaggattccgcagaagaccaccttgtcttcaaccgctccgtttcgctgaaggacggcttcaagaaaaagaagtaaaggaatagttgtccgcacagagcaaaaccatgcgctgtgcgggcttttgcttttccattcaatcggtgttttgttattcgtcaccttaattttaattttaggttgacgaaacgctttgagtgtggtaaactggtagacgaaattttcgctgccggttttgccggaaaggaaatttatgcgcatacaagatgcagttttagacgcgcttgaaaaaaatcgcggagaatacctctccggcgagcagcttgcgtcgtcgctcggcgtttcccgcaatgccgtgtggaaagccattcaaaagcttgaagaagccgggcataaaattcgcgccgtgccaaagcgcggctacacgctggcgccggaaagcgatgtgctcaccgtgcagagtgtctcacggttcctcgataccgatatgccggtttacttgcaggtgcagaccgaagtcacctccaccaatacgcttttaaaggcacaggcggagcagggcgcgccggagggcaccgtgctcattgcggaatcgcagacggcaggcaagggcaggctcggtcggcacttcacgtcgccgccgggtacaggtatttatttcagcctgctgctccgcccgcactgcaccgctgaaaaatcacttttcatcacgactaccgcagcggtcgccgtgtgcgaagccattgagcaggtcacggggctaaacccgcaaatcaaatgggtgaacgatgtttacctcaacgagaaaaaggtctgcggcattttaacggaagcttccgttgattttgaaaacggcggtctcaactgggccgtgctcggcatcggcatcaacatcgctgtgccggaagagggcttcccggaggagattcgctccatcgccggtgctattttcgacggcccgtgtcccgtggagatgcgcagccgcatttcggctgccgtcatcagtcgctttttcgcgctgtataagaacctcggctcgaacgcgttcatcgaatcgtaccgcagccactcgttcctcaccggccgcgccatcacgttctcgctcggggaggagacgtaccgcggtgtcgtcaccggtatcagcgacgaagcgcacctgctcgtccgtctcgatagcggagaggagcgcgcgttctccgcaggtgaggtgcagatccacaagggctttgcaaacccgaaagccgaataaactgcttagtgtgccgtattccgaaatgaataggggtaaataacatgaacagcaacagagagaaaatcaccaatatcgtcatggtcggcgtattcgctgccgtgcttgccgttttgtcgcagatttcgttcccgctgccgagcggcatcccggtcaccttacagaccttcgcagtcgccctgtgcggctatgcactcggctgtaagcgcggcacgctcgccgtgctcgtctatatcgtgctcggcgctgtcggtctgccggtgtttgcaaacttctccggcggcttcggttcgattgtcggtctcgcgggcggctacatctacggcttcctgcccatggctgcgctgtgcggtctcggcacaaaaatgccgcaccgtgtgctcgccattgtactcggtgttgcgggtcttgcggcttgccatctgtgcggcacgattcagttcggcattatctccggcaacggcccgtgggcggcgttccttgtggcctccgtgccgtatctcgtcaaggacatcgtctccgttgcggcggcttacggcgtagcgaccgccctcagtttcgcgctgaagaagagcggcattcacatcgcagcgtaaaagcgttttcacaaagcgtttagaataaaatagaaaccgaaaaggccgtctgcaagggaaagtcccgcgcaggcggtcttttgctttgacatcaatacagcattgtgctatactgaattttcaagggagcattcgcgcccaatacacgataaaggaggctgtaccatggatgttcgggtaggcgacaaattacaaatgaaaaagccgcacccctgcgggacaaacgtgtttgaagtgctgcgcatcggcgcggattttaaaatccgctgcaccggctgcggcagagaagtcatggtgccccgccacaagtgtgaaaagaacattcgcaagatcgtgcgcgaaagtgccggcagcgagcagtagcgcctctcagaccgtttcattttactatctgtctgaaaggaagctttgctatgtttgaaaatctctcggtttttgaaaaccgatatgaagagcttaatatgaagctctatgatcccgccgttgcggcagaccgcaatctctaccgcgacctcatgaaggagcacaaagaaatcgaacccatcgtggaaaaataccgcgccttaaaaaaggccgaagcgtcgctcgaggatgccgaagcgattttaaacgactccgaagccgataaagagctgcgccaaatggcgagcgacgagatgagcgccgccaaaagcgatatcgaaagcatctcggaagagctcaaaattttattattgccccgtgaccccaacgacgaccgcagtgttatcgtggaaattcgcggcggcgcaggcggcgaggaagcggcgctgttcgcctataacctttaccgcatgtacaatatgtacgccgaaaagcgcggctggaaaacggagatcgtcagcttgaatgaaacggagcttggcggctttaaggaagtcagcttcacaatcgacggtgacggcgcgtattccagattaaaatttgaaagcggcgtgcaccgcgtgcagcgcgtgccggaaacggaaacgcagggccgcatccacacaagcaccgccacggtcgccgttttgccggaagccgatgaggtcgagctcgagattgacccgaaagatttaaagattgatacattccgctccagcggcgcgggcgggcagcacatcaacaaaacgtcgtctgccatccgtgttacgcacctgcccaccggcacggtcgtcgagtgccaggacgagcgcagccagtacaaaaacaaagataaagccctgcgcgtcctgcgtgcccgactgttagacgctaaggtggcggcgcaaaacgccgagattgccgcaaaccgcaaaagtcaggtcggcaccggcgaccgttcggagcgcatccgcacctacaactacccgcagctgcgcgtgaccgatcaccgcataggcctgacaatctatcgcctgttcgacgtcttaaacggcgacctcgatgaaatcattgacgcactcatcgccgcagaccgcgccgaaaaactgaaagagagcatggagaacggatgaacatggatacgcgattattggatgaaaaaaacgaacaggatataaaagaagcggggaagattctgcgccgcggcggccttgttgctatccccacggagaccgtctacggcctcgccggcaatgcgctggaccctaccgtctccgcacagatctacaaagtgaagggtcgcccgtcggataatccgctcatcgtgcatatcgcggatatcaaagaattgcctgcgcttgtcgaagagattcccgaagctgccaaaaagcttgcagatgccttttggccgggcccgcttaccatcatcatgaaaaaatcgccgcttgtgccgatgcagacgactggcggtctcgatacggttgccgtccgcatgccgtccgatcccaccgcgcgggcgatcattaacgccgcaggcgtgccgcttgccgcgccgtccgcgaatctctccggcctgcccagccccacatcattcccgcatgtgtgcgatgatctcatgggccgcgtagacggcatcgtgaacggcggcgactgcgaggtcggcgtggagtccaccgttatcaccgtcgtcaccgagataccgcgcgtgctgcgcccgggcggcatttccgtggagcagctgcgccgcgtgctcggcagggtagatgtggaccgcgccgtgctggaaaagcccgcggaaaacgccaaggtcgcctcgcccggcatgaaatataagcactacgcgccgaaagcggatgtctacatggtggacgcttccgccgaagattacgccgcgtttttgcatacgcactccgaagcagctgcactttgctttaacgaagacgtgccgtacctcaaaaaccggtgcgtgccctacggcagcgccgcagattccctttcgcaggcgcacgggcttttcacgtcgctccatcacctcgatgagatcggcgcaaagaccgtttacgcccgtatgccgcgcaaaagcggcgtaggccttgcggtttataaccgtctcattcgcgcttgtgcgttccgcatcgtaacgccgaacaagcagcttgtcatcggccttacgggccagaccggcgcgggcaaatcgacggtcgcaaagcagcttaaggcgcgcggctgcgtcatcatcgactgcgacgccgttacgcacgatccgtctctttatgcaggaacatgtcttacggagttgcaaaatgcgttcggccgtgctattataaaggaagacggtacgttagaccgccgccgtctcgcaaacctcgcgtttgcaagcgaagagggcaagacgaagctgaacgccatcacgcatcccgtgattttaacacgtctcaaaaaggagattgccgcatataaagatgcaaaggtcatcgtgctcgacgctccgacgctgtttgaagccggtgcagatcgcctttgccgccgcgtggtctccgttcttgcggatgaaaccgtgcgccttgggcgcatctgccgccgcgacggtctcacggagcaggaggccctgacgcgcatgcacgcccagcagagcgacgatttttacatcgaccgctccgattacacactcgataacaccgtcgctgtttcggcggacgatatggataatatgctcgcagtgcttggctgcgcacaccccggtgaatccgattgaataagaaaagcaaacatttaaaaaagtccaaaaagaagcccttgtggccatggattcttatcgccggcattgcagctgccgtgctcgttgttttcgcggtgcaaaggctgcatcccgatgtagaccacatgctttacccgcgcaagtacggatccatcgtcaaaaaagaagcgaaggagtacgacttgccgcaaagccttgtctatgccgtcatcaaggcggaaagcgatttcgaccccgaggcggagtctccggtcggcgcgctcgggcttatgcagatgatgcccgaaacgtttgactggatgcaaacgcatatcggcggggaatatgacgcaagcgctttgctcgaccccgaaatcagcatcaaatacggctgtgcgctgctgcgcgtgcttttaaacgagtacgacaacctcgccacagcggtctgcgcctacaatgcaggcatgggaaacgttacgtcgtggctttcggaccccgcatattccgaagacggagtgaccttaaaagaaattccgtttgaagaaacgcgtctttacgtccagaaagtccttcagtataaagaaacttacgaaaaattgtatgggggaattgaaaatggctaaaaaagcagcggaaaaatccgcaaaagagctgtccgaaatgctcctcaacccgcgcaagaacggctttttcaaggtcacagatgagaagatcgaaaaagcagataagttctgcgaaggctacaaggcatttttaaacagcgccaaaaccgagcgcgaatccgttgagtacgcggtcgcggctgcagaaaagcacggctttgtgccgttcgacccgaagcacaagtatgcggcgggcgacaaagtgtattacaacaatcgcggtaaagcaatttgccttgccatcatgggtaaagagggctgcaaaaacggcgttcgcattgccgcagcacacatcgataacccgcgtctcgacttaaagcccatcccgctttatgaatcctccgagatggcgtacctcaaaacgcactactacggcggtatcaaaaagtaccagtggacagcgattccgctcgccatgcacggcgttgtcgtgaagagcgacggcacggtcatcaaggtctgcatcggtgaagaagcgggcgatccgcagttcaccatcacagacattttgccgcacctcggtcaggatcaggctacaaagccgctgggttctgcctttacaggcgaagaccttaacattctcatcggcagccgcccggttcgcgacgaggaggctaaggatgcatataagctgaacatcatgcgtcttttaaacgagaagtacggcatcatagaagccgacctcatctccgcagagatcgagttcgtcccggcgtttaaggcggtggatatcggctttgaccgcagcctcgtcggcgcttacggccacgatgaccgcgtttgcgcatacccggcgcttgaagctatcctcaactgcaagaacccggtgcagaccgtcgtcactgtgctcaccgataaggaagagaccggcagcgacggcaacacgggcctcaactccgagtacatgcgttacttcatcgctgacctcgcgcaggcagagggtgaagagccgcgccacgtgctctccaagtccacctgcatttccgccgacgtcaccgcggcatatgatccgcattatgcttccgtttacgaggcacagaactccacctacatcaacggcggtctgggcatagccaagtacaccggtgcacacggcaagggcggtacgtccgacgcgaacgcagagtttgtcgccaaaatccgccgcacgtttgacgatgcaggcgtgctttggcagatcggcgagctcggcaaggtcgatcagggcggcggcggcacggtcgcaaagttcatcgcgaacctcaatgtcgacgtgctcgacatcggtgtgccggtgctttccatgcatgcaccgtttgaggttgtctccaagctcgacgtctacatggcttacaagggcttcaaggcgttcttcgacgagaagtaagctgtaaagtgaaatagcattacataaaattcaaaaagctgcgcgtaaagcaataaaactttacgtgcggcttttctttatatcttcaagcaaaaagcccgccgcaaagcgcagcaggcctaattctttatgttaagatattttactttacagcggcagctgatccagttcgtcctctgtaaacaccgggatgccgtttgcgttcagaagctccacggttacaccgttgccgggaatcttgttgcccgtaaacgtgccatcgtaaatgagtcccttgccgcaggacggacttttcgccttcatcacggcaaaatccacgtggttcagcttcgcaaagtacagcgccgtctctgcgccttttgtgtactcctttgtcacgtccttgcctgcacaggagattaccttgtcaccctgccgctccgccgggtcgcggggggtgggcaaaccgcccatttgctcgggacatacgccgatgatcgtgttgctttctgcaagcttaatgagcgcatcgcacttgcagccgtcgcccttatagcggcattcgcagcccaaaaggcagctgctcgccaaaattacagccatgtttataccttcttttaatttgatttttgcactaaaagcgggtcattgcccgtagatttccggttcgttctcgtcctgctcgtagatttccacgttcgtcttgccgtccacagcttccaaatgcacggcgatgatctcgcgtagagaggtggggatattcttgcctacaaaatcagggcgaatgggcagctcgcggtgaccgcggtcgaccaaaacgaccagccgaatgcgcgccggccgcccgaaacggaacaccgcgtcgatcgccgcgcgcaccgtgcggcccgtaaacagcacatcgtccaccaaaatgacttctttgtcgttgaggtcgaccggaagcgtctgcgtgttcacagtcggcaggtcgtgccgctttgtcaggtcgtcacggtagaatgtaatatccagtgtgcaggtttgcacctttacaccggtgtgcgtctcaatgttcgccgcaatctgctccgcaagcggcacaccgcgcgttttgatgccgatgagcactacattttcgaggtcgcggcttttttcaatgatttcataagaaagccgcgtcaaagcgcgctttacggtaacgtcgtccatcagctgggctttcagcttcataggcatgcttgtcaatccttttcttaattctttgatttattgtagcatttcggcgcttttccgtcaagacgcgtctctttcggttgatttttgtcaaagcgtgtgctatgatactctttgaaaataaacgaaacaaggcggtgcgccgtcttacggactaaggaaggtcaaacatggaagcatatctttccaatcttacggttttcaaccacccgctcatcaagcacaaggtcagccacctgtgcgacgttaacaccggcaccaaggaattcagcgaactcgtcaaagagcttgccatgcttatgggctatgagacactcaaggagctcaaaacgaaggacgtggagatccaggcgccgctgcagaagatcattaccccggtacttgcagaggatttcaccatcgttccgattctgcgcgccggcctcggcatggtagacggcctgcgtgagctttcgcccacggcaaaggtcggtcacatcggcctttaccgcgatgaggaaaccctaaagccgatgacgtattactttaagctcccggtcgataccgcagacggccccgtcgtcgttgttgatccggcgcttgcaacaggcggcagcgcagatgcagccatccagtttttaaaggacgcaggctgcaagaacatcaagttcatgtgcattttcgcgtccgaggtaggcatcaagctgctgtatgaaaagcacccggatgtcaaaatctatgcggcaaactacgcacccggcccgctgaacgagaacggctacattcccaccgcagccggcgacgcaggcgatcgcctgtgcggcacagtcagctataaaccgaataaaaaccggtaatccttgtaaacgtaaaagctcttcgcatggttcggagagctttttctgtatttcaccgtcttttttgataaacattcacaaactattcacaagtgcgcgaattacgttgactttcgtcgaatgttgtgctatagtttagcgttagaaaacgaaatacgatctttaaccccgatactgtgatattggcaagattgactcttaatacgtctttacagacggcgtgctgacaaggctcaagctctgcctattttacaggcagagcttttctttatgttcggaaaagcataggggagaagagaacgtgttttggggtaagaaatgaaaccacggttcggaagaaaggaaatgatttcatgaagttgatttacggcatcgaagataagccgaagttcagcaaaacactggtcttcgcattccagcagatgatcgccatcatggcggctacgctgctcgtaccgctgcttgtcaccagctacggcctgcaggcagacgccgcagccgcactgttcggcgcgggcatcggcaccatcgtatacctgttctgcaccaagcgcagaagcccggtattcctcggctcctcgttcaccttcctcggcgcgtatgctgccacaatcggtcagaattacggctactggggtatgctcatcggcgttgcgttcgcaggtcttgtttacgtcatcatcggtcttgtcatcaaggtcgtcggctccggttgggtcaataagctgatgccgtccgtcatcatcgggccgatcgtcgcgcttatcggtctgtccctctccggcacggcaacaagctggatcatgggcaacggcgctgcaactgtcgtatacggcgagacctacaactgggctgccatcatctgcggcatcttcaccttcttcatgattgtcgttgcgtccgttaagggctccaaaaccgtcaagctcattccgtttatcgtcggcatcggcgcgggctatgcgcttgcactcgtctttacaatcatcggcatggcaacgggcattgagagcctcaagctcctttccttccagccgttcatcgatgcattcggcacattcagcatcaccagcatcgtcgattatccgaagttcttcttcctcaaagcaatcgagacgaacggccagtatccgcttgatgcggctgctatcggcaacatcgccatgatctacattccgatcggcgtcgtcgagctcgcacagcacatcgctgaccacaagaacctcagcacggttgtcaaccgcgatctcatcgcagacccgggcctcgataagaccctcatcggcgacggcctcggctccattgtgggcgcgttcttcggcggctgtgcaaacaccacctacggcgagtccatcggctgcatcgccatcaccggcaacgcttccgtcgtttccatcctcaccgcggcactcggctgcatggtgctttccttcttcactccgttcgtcgtgctcattaactccattccgaagtgcgtcatgggcggcgcgtgcatcgcgctctacggcttcatcgccgtttccggtctccagatgctccaccgtgttgatctcggcaacagtaagaacctgttcgtcgtcagttccatcctcgtctgcggcatcggcggtttgtacttcggcttcggcacgaacagcatcaccggcggcgctctgctgaacatcacgtctttggctgttgccctcatcgtcggcattgtcacgaacctcatcgtcaataacggcaagctcagcagcggcgaggacggtcttagcagtgcagcttccgaaatgggaaaggtagacccggaaaccaccgagatcccctcccgtaaaagcaaaaagaagtaattcttcaaagaatagcgttaactgaaatgcacagcgcccgggcttcacggctcgggcgtttttctgttgtaaaggaattcgacttgctttttttccgtcatccgatataatagtaaaagataccgaaagaaaggggagagcaccgtgcggaaacgaaaaaaatacagccccatccaaaagccgcgtccgctgcatttggagcgcattatgaacctaaagcgttggacgggcattctgcttatctgcgccgccgcttttatggcgcttgcactgttcgtcatgtggggcttgccggtgcttttcccgcccgaagatccggaggatctcctgccgcaggccaccgtactgcccaccgcgtctcccgctgcaagcacggaggaaaacgacctgcccgtgctcgaggacagcgtgaatctgttcgtcatcaacgaagaccaccctgcggacgcggattttgcccccgaggagaccgccgagtttgacagcgtcacggtcgatgcccgcattgtgccggcactcaccgcactgtgcgatgccgcaaaagcagacggtgtcacgctcaagttttccggcggctatgtgtcctatgcagagcaggaatcgctttataacgccgaggtcgagcgccttatcgcggcaggttccaccaagattatggcgcgtgaagacgcaaaatccaccgtgtctgcgcccggcacaagcgacctgcaaagcggcctgtgcgtcaccgtgcaggacgaccccgcgacgttttcgacaacggatacctacggctggctgcaaagaaacatggcgcattacggctttgtgttccgctatcccgccggaaaagaggatgaaaccggccttaaacgcaatgatcttgtcctgcgctatgtcggcacagagcacgccgccgccatccgcagactctccttttgcctcgaagaataccttcgctacatcggcgcctaacgaaaaaacggatgctttcgggaagaaaaagaaaaaagttttctgtttttttgaaaaagaccttgcattttagaattttttgtgctaacataattagcgctatgtttatgtgttaacttcgctgttaaccgactaaccgcagatcaaccgaaagaggtgacagatatgaagaatatacatccggactatcaggaaacgaccattacctgcgcatgcggcaatgtgattcacacgcgttccacgaagaaggacatccgcgttgaaatttgctccaagtgccatccgttctttacgggtaagcagaagctggttgatacaagcggtcgtgttgatatgttcaacaagcgctacggtatcacgaagtaaatttatatggatcgttcagggcggtgctctttcgggcatcgcccattttttctccaaaggcaaatcgcgttcgtttcaaaacagaggggagcggtaaaaatggcagagtacaaaaccgtgcggaaaaacgcgcaggaccagtttgtggaaaagcgatcgcgtttcatcggctatgcctgcccggtgcagaccgagcaggatgcgctcgatttcatcacgtccaaaaaatccgagcactgggatgccagtcacaacgtctatgcgtatatcctgcgcgacggcaccatgcgcttttcggatgacggcgagccgcagggcacggccggtatgccggtgctggatgtcctgcgcaaaagcggcgttacggatgtcgtcacggttgccacacgctatttcggcggcattctgctcgggggcggcggtctcgttcgcgcgtattcgcacaccgcgtccatcgccctgcaggcggcacagatcattaccatgcgcgagtgcctgctgttgtcgcttacctgcgattacggccggtacggccgcgttgcatcgcttgttccggaatgcggcggcgtgacggacgacacggtctttgaggaaaaagtcaccgtcaaattccatttggcgcccgagctgctcggtgcattccgcaaaaaacttgcggatgccacaaacgggcaggtcgatgtgacagaagacggaaaaaaattttttgaatttgaagaataaaagaagtaatttcgccgtttgcggcgtatataatactatgagggcaaaaatcagggcgttttgctccgagctttgcccgtaatcccaacggcatcgcgccggcggtcacgaaagggggcggtggaatgccgttgccggagtcctttatgcaggacttaaaatcgcgctgcgacattacagacatcgtttcctcgtatgtcaacctaaagcggcgcggcaaaaacatggtgggactgtgtcccttccacaacgaaaaatcaccgtccttcaacgtctacccggagaataactcgttttactgcttcggctgcggcgcgggcggcgatgtcatcacattcatccgcaagattgaaaatctcgattacatcgaggccgtgaaaatgctcgcggaccgcgtggggctgcaaatgccggagcagggcgtggacgattccatgagccgcctgcgtcagcgcgtgctggaaatcaaccgcgaatccgcccgctttttccacagcgcgcttttaagcccggagggtaagccggggcttgattatttcgcgcgcaggcgcctgcccatgaaaatgatccgccatttcgggctcggctgggcgccggaaagccgctttgcgctcgtcaatcacctgcgctccaagggctattccgagcgcgagatgattgcggcgaacgtcgcggtggagacgcgctccggccgcgcgatggatcgtttccacgcacgcgtcatgtttcctatcattgatctgcgcggcaacgtggtcgcgttcggcgggcgtattttgacaaatgaaaagccgaagtacataaatacatcggataccccggtctaccacaagagcagcggtcttttcgcgatgaattttgcaaaaaacgcgctcgaaaacgaccgcatcattttagctgagggctatatggacgtcatctcgctgcacaaagcgggcattgaaaacgccattgcgtcgctcggcacggcactcaccgcagagcaggcgcgcatcattgcccgctatgcgaaagaggtcgtcatttgctacgattccgacgaagccggtcaaaaggccgcacagcgcgccattcccattctgcgcggcgcagggcttttggtgcgcgtcatggccgtgcccggcaacaaagacccggacgagttcatcaacgcatgcggtgatgaaggcgcggcgcgtttccgtaggctcattgagcaaagcggcaacgatgtggaataccgccttgcaaagctgaaaagcgggtatgatttaagcaacgaaaacgggcgtattcaatacctgatgaccgccgtagagctgctggcgggccttgaaaacgccattgagcgcgacgtgtacgtcagccgcctttcgcaggaattgaatgttgacaaaaacgccattttgcagcagatgtccgtttccgtgcgcaaaaaagcgcgtgcggcgcagcggcaacagcaaagggacatgacggagcagctttccgcgcggcgcgataccgtaaaccccgaaaagcgccgctatgtccgcgtggccaacgccgaagagcggctcatcgcgtgccttttccacaataatgacctcgcacagagcctgaaccgccgcgtgccgcccgaaaaattcgtgacggcgttcaatcgccggttatatcagagcctcctgggcaagattataaacgaagaaacggtcacatcgccgcagattacagacttttcggcggaatgtacgccggacgaaatgggccgccttgcgaagtttgtgcaggaaaacgccggcatcaccgccaaagacgcggaagaatacgtgcagatcattttgagcgaaggcgcgttgaccgataccgataaggtgcgtggtgcgaaccccgccgacctgcaggcgcagctcgatgcactgcgcaaacagaaaaaataggaacgttatgctttaaaacagaatggagataaaaaggcagcgtgcagacgctgccgagggaataagggaaaacacaggaaaggtatgataaactatggcagcacccgataagaaaaccgtgatccgcgatctgattgagctcggcaaaagcaaaggccagctcaccacaaaggagatcctcgacgccatcggcgaattggatttcgacccggagcacattgaaaaattctatgatacactggaatcgcacggcattgagattatcgatgacttcagcgatatccagattgatgacatcgacctttccaaagtatccggcgcagatacggacgattttgacgccggcatgggcatggaaggcgtcgccatcgatgacccggtcaaagtttacctgaaagagatcggccgcgtgccgctgctttcctccgaagaagaagtgcgccttgccatcgccatcaaggacggcgacgaagccgcaaagaagcgcctttccgaagcgaacctgcgtcttgtcgtcagcatcgcgaagcgctatctcggccgtggcatgcagttccttgacctcattcaggagggcaatctcggcctcatcaaggctgttgaaaagttcgattatacaaagggattcaagttctccacctacgcaacgtggtggattcgtcaggccatcacgcgcgccatcgccgaccaggcccgcaccatccgtatcccggtgcacatggtggagaccatcaataaggtgaagaaggtctccagccagctgctccacacgagcggccatgagccgaccgcggaggaaatctccgacgagctcgatatgccggttgataaagtgcgcgagatcatgcgcgtcgcacaggagcctgtctcccttgaaacgccgatcggcgaggaagaggacagccacctcggcgactttatcccggatgacgacgcaccggccccggcagatgccgcttcccatacgctgctgcgcgaaacgctcggcgatgtgctcgattccctcaccccgcgtgaggaaaaggtgctgcgcttgcgcttcggccttgaggatggcagaagccgcacgctcgaggaagtgggcaaggaattcaatgtcacccgtgagcgtatccgccagattgaagcaaaggcgctccgaaagctccgtcacccgagccgcagcaagaagctgaaggattttctggattgatcccgaaaggataggcacataccatgcacatgacactggaagcggactacgcagtccgcatcgtggaatttttggccgtgaaccccgggcgcgcagatgccaaaacgatctcggagcgcacaagcgtcacgctgcgctttacgctgaagattctgcgcacgctcgtttcggacggcatcgtgcgctcgtataagggcgcaaagggcggctatgagcttgcaaaaccgccgaaggagatcacgctgcgcagcgtgatcgaggcggtggaggggccgtatatgatttcccgctgccagggcgatgcgtacagctgccagcgcacctcgtgccgtttgcatcacatctacggtgaggtctcgcagcttgtgcgcaataagctggagtcctacacgttcgcgtccatctgtgcctgcgaggataccgaggcggacgaaaaaggtgaggggaaagaggcagaaacgtaagcgaatccgcgtaaaagtacgcgcaagtacatacttaaaacgcaataattcgttttgaaagcggctttcgctttttagcttaatttcttcggcattcaaaattcaacataaacaaaacaaaaaccttcccggtttcgtttccatttggaaaccgggaaggttttgcgtgtttttaagcggtatgagcgccgtgagattctgcacgggcaagagctacggctcagtttatgcggctgccgccccattccaccgctgtgaagccgtcgcgggcgggagcggtgagcgtttgcgcgggaatgtcgactttctcttcaagcggtttccacgccatgaagacccgaaggagcgtgtcgggcgcggggcagatatccagctgcgccacctgcgtatagcagtcggactgaaacgcgatgagattatagggattttcctgcatctggggaagccagtacacgatgaattcattcgcttctttgcgggtgagtccgaggtcgcgcaaggcattttcgaggaaagcggcggtgtcgctgcccgctacgcagaagccgtgggaaaggtcgtattccgcgctgtccgtgccttcccagtacaggtagttatacgtttggccgtcctcgtccgtcagagtaccgtcaggtttcgccgaaacatgccagccggttttgtaattcgggtaggtgcaagtgagcgttccgtcgtacgcgagcgtaaccgagacgtccgtttcttcttccggataaagataaatcaccggctttaacgtgagttgctcttcttcacgttcacggcatgccgaaagcccgcacacgaagctgattgcaagggccgcagcgaaaatctgctttgcgaaatgctttttcatacagtgttcctcttcaaattaaaatgattagcagcggataaaaataaagcccgattgcagtttacaaggtccatgtgctatcgggtatacgggtcaaaattcaatttattctgctttggaatttgagaaaagaaaaagggaataaaactcgaaaaatttcgggaaaaggcttgacaaatccacagatacggtgtatcatattacaatgtatcatcatggatagatatgccatttctttctctgatctgcattataacacagttccgaaaaataatcaagcataatctataaaattcacatgaacggatattctttccgccgtttttaagtgattttgcttaaaaacacgggtcaaatactaagaatggagtggttgagtcaatggtgaatgttaagccggtacagcttggcaagaacacacgcatgagcttctcgcacatcaatgaagttctcgatatgccgaacctgatcgagattcagaaaaattcctacgactggttcctgaaggaaggtctgaaggaagtttttgacgacgtctccggcattacggatttcaacggaaatctggttctggacttcgtgaactacaagctcgacgaaaaacccaattacacggtaacggaatgcaaagagcgcgatgctacctatgcggcagccctgcgcgtcactgcacgccttctcaacaaggaaacgggcgagatcaaggaatctgaagtcttcatgggcgatttcccgctgatgacaccgtccggcacctttgtgatcaacggcgcagaacgtgttatcgtttcccagcttgttcgttctccgggcgtctattataagatggagtacgataaaacaggcaaacagcttttctcttccaccgtcattccgaaccgcggcgcatggctggagtacgaaaacgatgtgaacgacgtactctacgtgcgtatcgataaaaacagaaagctcccgatgaccgcgttcatccgcgcactcggtctcggcaccgacgaagagatcaaggaatacttcggcgaagacgagcgcatccttgcgaccatcgataaggataccacgcacaccatggaggaaggcctctttgaggtgtacagaaagctccgtccgagcgagccgcccacggttgaaagcgcgcagttccatttgaacggcctgttcttcgacccgagacgctacgacctctccagagtcggccgttataagtacaataagaagctgaacctcgccggcagaatcaccggccgtcagctttcccgcccgatcgtcaacccggcgaccggcgaggtgatggcagaagcgggcaccgttgtgtcccgcacgcttgccgaagacatcgacaacgccggtgtgaccactgcttgggttgcccttgaggacgacaaggagacgaaggtcatctcgaacggcatggtcgatatcgcaaaatatgtttcctttgatgcagaggcagagtgtggcatcaacgaacgtgtgcgctacgcagtgctctccgagattctcgaagcgtgcggcgacgacgaagagaagctcaaagagcagctcaccgcgcgtcatgacgagttgatcccgaaccacatcatcattgatgatattttctcctccatcaactacatgacctgccttgctgtcggtctcggctttacggacgatatcgaccagctcggcaaccgccgtatccgttccgttggcgagctgctgcagaaccagttccgcatcggtttctcccgcttggagcgcgtgatccgcgagcgcatgacgctgcagggtcaggatatggaatcccttacaccgcattctctcatcaatatccgtccggtcgttgcagcgatcaaggagttcttcggttcttctccgctgtcccagttcatggaccagacgaacccgctggccgagctgacgcataagcgccgtctctccgctttgggcccgggcggcctttcccgtgaccgtgcgagcttcgaggttcgagacgttcactacacacactacggccgcatgtgcccgatcgaatccccggaaggtcagaacatcggtctgatttcctaccttgcaacgttcgcaagaatcaatcactacggcttcattgaggcgccgtacagaaagattgataaggcgacgggcaaggtcacggacgaagtcgtttacatgacggcggacgtggaagacgagttcatcgttgcgcaggcaaacgaaaagctgaatgaagacaacacctttgcaaacgacagcgttctcgcacgtttcaagggcgagttcattcaggttgagccgacccgcgtcgattacatggatatttccccgcgtatggtcttctccgttgcaacggcgatgatcccgttcctcgaaaacgatgacgcaaaccgtgctctgatgggcgcgaacatgcagcgtcaggcagttccgctgctccgcaccgagtctccgatcgtcggcaccggcatggagtataaagcaggcgttgactccggcgtctgcgtcctgtgcgaacgcgcaggtgtcgttaagagcgtcagcgcagacctcattcgcgtgacgaccgataacggcgatgtcgacgactatgtcgtcacaaagttcatgcgttccaaccagagcacctgcatcaaccaggtcccgatcgtcaaccgcggcgaccgcgttgaagtgggcgatgttctggcggacggcccggccattaagaacggcgagatcgcgctcggcaagaacgcactcatcggcttcatgacctgggaaggctacaactacgaggacgccgtcctgctgaacgagaaaatcgtacgcgacgacgtttatacctccatccatattgaagagtatgagatggaagccagagatacaaagctcggcgcggaagagattacccgcgacatcccgaacgtcaacgaagatctgctgcgcgaccttgatgaccgcggcatcattcgtgtgggtgcggaggttcacgccggcgatattctggtcggtaaggtcacgccgaagggcgaaaccgagctgaccgccgaagagcgcctgctgcgcgccatcttcggtgaaaaggcccgcgaggttcgcgatacgtccctccgtgttccgcacggcgagtacggcaccattgtggacgttaaggtcttcacaagagacaactgcgatgagctgagccccggcgtcaacaaggtcgtgcgctgctatatcgcacagaagagaaagatctccgtcggcgataagatggccggccgccacggtaacaagggtgttgtttcccgcattttgccgatggaagagatgccgttcctgccggacggtacaccgcttgacatcgttctgaacccgttgggcgttccgtcccgtatgaatatcggacaggttctcgaggttcacctcggcatggcggcaaacgcactcggttggaagattatgaccccggtattcgacggcgcacacgaagcggatatccgcgagtgcttccgcatggcgggcatgagtgaggacggcaagttccgtctgcgtgacggtcgtaccggcgagtatttcgataacccggttaccgttggctacatgtactacctcaagctccatcatcttgttgacgataagattcacgcccgttccaccggtccgtatgccctcgttacccagcagcctttgggcggcaaagcgcagttcggcggccagcgcttcggcgaaatggaagtttgggcgttggaggcttacggcgcggcttacaccctgcaggaaattctgacggtgaagtccgacgacgttgtgggccgtgtaaagacctacgaagccatcgttaagggccagaacgtgccgaagccgggcattccggaatccttccgcgttcttatcaaggaactgcaggcactcggcctcgacatcaaggtactggataaggacaacgaggagattgacctgcgccagagcttcgacgatgacgatgatgtgggtctcaccccgggcgatcaggtctttgatgaagaaaacgtcgcaacggacggcgatttcgacggctattccatcgagaacgaagacggggaagaggacgacttcttctctaccggcgacgacgatgagtttgaaggctccgataacgatttgtttgacggcatcgacgacgagttctaatttcgggtgaaaggaaaggatcgcatatatggagtttaacgtttttgaatcaataaagatcggccttgcatcgcccgagcagattcgctcctggtcgtacggtgaggtcacgaagcccgagaccatcaactaccgtacattgaagccggagcgcgacggcctttactgcgagcgcattttcggaccgacaaaggactgggagtgccattgcggcaagtataagcgcatccgctttaagggcaaggtctgcgagcgctgcggcgttgaagtgacgcgcagcaaggttcgccgtgagcgcatgggtcacattgagcttgcagcgccggtttcgcacatctggtactttaagggcatcccgtcccgcatgggtctgattcttgacctttccccgcgcgtactggaaaaggttctgtatttcgcactttacatcgttacggatccgggttccgtccgtgagctctctaagatgcagacgctcaccgaaaaggaataccgcgacatgcgtgaaaaatatgaggacgacttcgaggcgtccatgggcgctgaagctgtgaagaagctgctcgaggatatcgactgcgaaaagctcagcgaagagctcaaaaaagatctcgaaaccgcgcagggacagaagcgcgtgcacattctcaagcgccttgaggttgtggaatccttccgcatctccggcaaccgcccggagtggatgatcctcgatgccgtgccggttatcccgccggatatccgtccgctcgtacagttggacggcggccgctttgcaacgagtgacctgaacgacctgtacagacgcgttatcaacagaaacaaccgtctgaagagactcatcgagctcggcgcgccggacatcatcgtgcgcaacgagaagcgtatgctgcaggaagccgtcgatgccctcatcgacaacggccgccgcggcagaccggtcaccggcccgaacaaccgcccgctcaagtccctttccgatatgctgaagggcaagcagggccgcttccgtcagaacctgctcggtaagcgtgttgactattccggccgttccgttatcgttgttggcccggagctgaaaatgtaccagtgcggcctgccgaaggaaatggcactggagctctttaagccgtttgttatgaagcgccttgtcgagaccggtgccgccggcaacatcaaggctgcaagaaaggctgtagagcgcgcgaagagcgaggtttgggacgcactggagattgtcatcaagaaccatccggtcatgctgaaccgtgcacctacgctgcaccgcctgggcattcaggcgtttgagccggtcctcgttgagggccgtgccattaagctgcatccgctcgtctgcaccgcgttcaacgcggacttcgacggcgaccagatggctgtgcatgtgccgctttccgcagaagcacaggcagaggcacgtttcctcatgctggctgcaaacaacctcttaaagccttccgacggcagccctgttgcggtcccgtcgcaggatatggttctcggttcttattaccttacgctcgataaggacggagagaccggtgaaggcaaggtattccgcaacatggacgaagcgttcatggcgtatgacgcaaaatatatcacgctgcactccaagatcaaggttagaagaaccgtggagtacaacggccagacatataccggccttgtcgatacgacgatgggccgcatgatcttcaaccgcccgatcccgcaggatctcggctttgttgaccgcaccgacccggagaatatcctcaagtttgaggtcgatttcctcgtcggcaagaagcagctcggcaagatcatcgacaagtgcatcaaaaagcacggcacggcgatcacaagcgaaatgctcgatgccattaaggcacagggctacaagtattccaccatcggcgcaatcaccgttgctgtctgcgatgcgactattccgccgcagaagcaggagattcttgcaaaggcagaggcagagatcagcgagattaccgcagatttccgcgacggcttcctctccgacggcgagcgttacagcgcggttctgaagacctgggaaaaggcgacgaacgacgttacgaaagccctgcaggacggccttgaccgttacaacccgatcttcatgatggcagactccggcgcccgtggttctatgaaccagatccgtcagctggccggcatgcgcggtctgatcgcgaatacgtccggtaagacgatcgaaattccgatcaaggcgaactaccgtgaaggcctgaacattttggaatacttcatttcctcccgtggtgctcgtaagggtcttgccgatacggctctgagaacggctgactccggttatctgaccagacgtctggttgacgtttctcaggatgttatcgttcgtcaggatgactgcggtacgaccgagggtctggaagtgttcgaaatcaaatccggtaacgagtccattgagccgcttaaggagcgtattgtgggccgctacctgcttgacgattactgcgacgagaatggcaacgtgctcgtttctaaggataagatgattggcgacgccgaagctgacctcatcatcagccgcggcacgacgcacatcaagatccgctctattttgaactgccgcacccgtcacggcgtgtgcaagaagtgctacggttcctcccttgcaaacggccagccgatcacggtcggcgaggcggttggtatcatcgccgcacagtccatcggcgagccgggtacccagctgacgatgcgtacgttccataccggcggtgttgcatccgcagaagatatcacgcagggtcttccgcgtgtcagtgagctgtttgaaagccgcaagccgaagcatctcgcaatcatcgcagagatcggcggtacgatcggctttgaagaggtcaagaagaaccgccacattgtcgttcgcggcgatggagaccagcgcagctacctcatcccgttcggcgcacgcctcagcgtaaaagagggcgatgtggttgaaaagggcacccgcttgaccgaaggctccgtcaacccgcacgacgtgctcgccatcagcggcccggaggcggtgcaggattacctcattgaagaagtgcagcgcacctaccgtatgcagggtgttgatatcaacgataagcacatcgaagttatcgttcgtcagatgatgcgcaaggtgcgcattgaagacgcgggcgacacgccgctgctcgtcggcgcgctcgtcgataagaacgacacgcttcttgaaaacgagaagatcgccgcaagaattgcaaacggcgagaccggcctgcgcgaggcgacattcacgccgacgctgctcggtatcacgaaggcatctctggcgaccgagtccttcctttccgctgcttccttccaggagaccacacgcgtgctgaccgacgccgccatcaagggcaaggtagacccgctgcttggcctgaaggagaacgtcatcatcggtaagctgattccggccggcaccggcatggactgctacaccaatgttgaaattgcgccgacggcgccgagcagctctttaagccaggaggccgtagccgctttgagcagctttgaggaaaaaacttccgcacagaatgcagaagagggcttgacaaacgaataatgagcggtgtataatgtcaaatggtgtgttgtgggcatgaaatctgagaatttctgccagaaccgcctttgaaaccgcataaaacagacctgtccgcgcgatttttgtacggacaggatactgttttgtataggcgcatgttctgcgggcaatataaacccgcatgacatatatagaaattgtgtaaggaggtgcaatatgcccacatttaaccagttgattcacacaggtcgcgcagtttccgagaagaaggcaaaggcgccggcactgctgaagggttggaactccaagaagagaattgctatcgatcaggattctccccagaagcgcggtgtctgcactgctgttaagactgctaccccgaagaagccgaactccgcacttcgtaagattgccagagtccgtctttccaacggtatcgaagtctccgcttacatcccgggtgttggtcacaacctgcaggagcatagcgttgttatgatccgtggcggtcgtgttaaggaccttcctggtgtacgttaccacatcatccgcggcacgcttgacgcgcagggtgttgcaaagcgtatgcaggctcgttccaagtacggcgctaagagaccgaaggccggcgctgcaaagaagtaatttctttaaagagccaaatttaatcgttacacaatgaacttttgaccggaaaagcgaaattcgctttaagggtatttataatagataagctactgattatcgtgcgtaaataccttttcttagccggcgggagcttgtgctttcgagtaccgatgaattcatactattatgtgaaggagggaagactatgccaagaagaggcaatgtagcaaaacgcgatgttttgccggatcctatgtataattccaaactggtcacacgcctgattaacaacatcatgtatgatggtaagaagggcgtagctcagaagatcgtttacgaagcattcgagatcgtcgaagagaagacgggcaagaacgctctggaggttttcgagcaggctatggagaacgtaatgccgagcctggaggttaaggcacgccgtgttggcggtgcgaactatcaggttccgatcgaggttcgtccggagagacgtcagaccctgggtctgcgctggatggcgagctattccagacttcgttctgaaaagacgatgaaggagagactggccggagagatccttgacgctctgaacggcgccggcggcgctgctaagaagcgtgacgatacgcataagatggcagaagccaacaaggctttcgcacattacagatggtaatttacctgtaaacgtattaaggaggattatatggcccgtcaggtaccacttgaatttacaagaaatatcggcatcatggcgcacatcgatgccggtaaaacaacaacgaccgagcgtatcctttattacacaggcgtcaactacaagatcggcgagacccacgacggttccgctacgatggactggatggcacaggagcaggagagaggtatcacgatcacttccgctgctacgacgtgcttctggccggacagaaacggtcaccagaaccgtatcaacatcatcgacaccccgggccacgttgacttcaccgttgaagttgagcgttccctgcgtgttctcgatggttccgtaacggttttctgcgcaaagggcggcgttgagccgcagtctgagaccgtttggcgtcaggctgaggaatacaaggttccgcgtatggcgtatgtcaacaagatggacattatgggcgctgatttctaccgcgttgtcaacatgatgcgcgagagactgaagtgcaacgctgtaccgatccagctgccgatcggctctgaagataccttcaagggcctcatcgacctcgtggaaatgaaggcttatgtctactatgatgatctcggcaaggatatccgttgcgaagagattccggaagacatgaaagagctcgcagagaagtatcacaccgagatgatcgagcatgtcgccgagcaggacgacgcactcatggagaagtatctcatgggtgaagagctcacgatcgatgagatcaagacctgcatccgcaagtccaccatcaacaacacgatggttccggttacctgcggtacttcctataagaacaagggtgttcagaagcttctggacgcgattgttgattacatgccggctccgacggatgttccgtctattaagggcataaacccggaaaccgaagaagaggacgttcgtcactcttccgatacggagccgttctccgctcttgcatttaagattgctacggacccgttcgtcggtaagctgtgcttcttccgtgtgtactccggtacgcttacggctggttctaccgtttacaactccacaaaggataacaccgagcgtatcggccgtattgttcagatgcacgcaaaccacagacaggatctggaaatggtttacgcaggcgacatcgctgctgcagtcggtctgaagaacaccaccaccggtgataccctttgcgacgaaaagcacccgatcatccttgagtccatggaattcccggagccggttatccgtgttgcgattgagccgaagaccaaggccggtcaggaaaagatgggcattgcgcttgcaaagctcgcagaagaagacccgaccttcaaggcctataccgatgaagaaaccggccagaccatcatcgccggcatgggtgagctccatctggagatcatcgttgaccgtctgatgcgtgagtttaaggttgaggctaacgtcggtaagccgcaggttgcttacaaagagacgatccgcaagaatgcggattccgatatgaagtacgctcgtcagtccggcggtaagggccagtacggtcacgttaagatccgtattgagccgaacccgggtaagggctacgagttcgtcaacgcagttgtcggcggtacggttccgaaggaatatatcccggctgttgaccagggtatccagggtgcaatgctctccggtgtacttgcaggctacaacgttgttgacgtgaaggtcacgctgtatgatggttcctatcatgaagttgactcctctgaaatggcctttaagatcgccggctccatggcatttaaggatgctatgcgcaaggctgatccggtcatcatggagccgatcatgaaggttgttgttaccgttccggaggaatacctcggcaacgttatcggtgacctcaactcccgtcgcggcatcatgcagaatcaggaggctactccgggtgctatgcagatcaccagcgaagttccgctgtctgagatgttcggctacgcaacggacatgcgttccaagacccagggccgtggtcagtacaccatggagccctctcactacgctgaagttccgaagtctgtttctgaaacgatcatcgcttccagaaaaaaggctgaataaagcgaaatactacttgatttttttgcggtttgttgctacaatggtaataaactcaaaaggttattttactgaataaaaggaggcaattccaatggcaaaggctaagttcgaaagaaataagccccatgtaaacatcggtacaatcggtcacgttgaccatggtaagactactcttactgctgctatcacgaaggttctcgctctgaagggccaggcacagttcgaggattactccatgatcgataaggctccggaagagagagagcgtggtatcacgatcaacaccgctcacgttgagtatgagacggacaagcgtcactacgctcacgttgactgcccgggccatgctgactatgttaagaacatgatcaccggtgctgcacagatggacggcgctatcctcgtcgtttccgctgctgacggcccgatgccgcagacccgtgagcacatcctcctctcccgtcaggttggtgttccgtacattgttgtattcatgaacaagtgcgaccaggttgacgacgaagagctcctcgagcttgttgagatggagatccgtgacctgctgaacgagtatgagttcccgggcgatgacaccccgatcatcaagggttccgcttacctcgcactcaccagcgagtccaaggacgtcaacgctcctgagtacaagtgcatcctcgacctgatggatgctgttgacgactacatcccgaccccggaacgtaaggctgaccagccgttcctgatgccggttgaggacgtcttcaccatcaccggccgtggtactgttgctaccggtagagttgagcgtggcattctgaagatgtctgacgaagtcgaaatcatcggcctcaccgacgagagaagaaagtccgttgttacgggcatcgaaatgttccgcaagctcctcgactttgctgaggctggcgacaacatcggcgttctgctccgtggtatccagagaaccgacatcgagcgcggccaggttctgtccaagccgggcacgattcacccgcacaccaagttcaagggccaggtttacgttctgaccaaggacgaaggcggccgtcataccccgttcttcaacaactatcgtccgcagttctatttccgtaccaccgacgttacgggcgttatctctctgccggaaggcaccgagatgtgcatgcctggcgataacgttgtcatggacgttgagctgatcaccccgatcgctatcgaagagggtcttcgcttcgctatccgtgaaggcggcagaactgttggttccggcgttgttacgggtatcaacgagtaatttttgctcaaactaaaatctcatcattttcttcggggcgaggtgtgattcctcaccggcggtaaatgcctttggcataagcccgcgaccgcagttttgcgctgatccggtgtgattccggagccgacggtatagtccggatgatagaagaaacgtgaatcaaaaggatttcggcaccccgcgagttttcgtggggtgcttttttgattcttacccccgtttctgtattgacatagtataagttgggaatgcgcatggcttatgcggaattctaaaggcggcgctgcgcgaatttgcgttttcccgtaaagggaaaatgcaagcgcgagtgaatttccttgcgctgcctgatattcatacagaaaggttctgacatttatgaccgtaaatactgcaaaaacttccaatgtgaatattcgtaaaattgcaatgaccggcgtactggcggcgattgcgaccgttttgatgtttttacacttccagctgccgtttatgccgagctttatttcgctcgacttttcggagctgccggcactgatcgcggcgtttacgcttggcccggtgagcggcgttgccgtttgctttgtgaaaaatcttgtgctgctttcgcagaccatcaccggcggtgtgggtgagctctcgaacttcattatcggttctgcgtttgtggtgccggcggggttgatttaccgccaccaccgcaattacggcggcgcgattgtgggctctgttgttggcgcgcttttgatggcagtgctgggattcttctcgaatctgttcatcatttacccaatctatacgaatgtgatgccgatggaggccattatgggcatgtatcaggcaatcaatccgtccgtgcaggagttgtggcaggcgcttttgatctttaatttgccgtttacgttctgcaaggggctcatcagtgcggttatcacgattctggtatataaaaagctggagccggtcatcaacggcaaagtcgtatgatatgccggaaattggcagtataaagccgggtttttctgcggtttttcccttgctatttgcgaaaaactgtgttatacttttttacagtcaaaaatgaatatgcccttatcaagagtgacggagggaacaggccctttgatgtccggcaacctgcattttgcaaggtgctaattcctgcggcatggcaatgccgaaagatgaggattttgaaccgctcatcttttgagcggttctttttttccgaaaattccttgtgggggctgtgagtgaaaagagtaaaggagcaaaacatgaataacaaacatctttttacatccgaatccgtgaccgaaggccacccggacaaggtttgcgaccagatttccgatgcaattctcgacgatatcatggcgaaagacccgaccgcgcatgtagcttgcgaagtgacggcgacgaccggtatggtgcacgtgatgggcgagatttccaccgagtgctatgtggacatcgatgcgattgcgcgcaaggtcatcaaggaaatcggttacgattctccggatgcgggcttcaacggtgcgacctgtgcggtgctgacctccatcgacatgcagtccccggacattgcaatgggcgtgaacgaatcccttgaaacgaaaaacggtgccgctgaccaggacgacctcattggcgcgggcgaccagggcatgatgttcggctatgcctgcgatgagactccggagctgatgccgctgaccatctctttggcgcataagcttgcaaagcagctggcaaaagtccgcaaggacggcacacttgactacctccgcccggacggcaagacgcaggtgacggcggaatacgacggcgacacggtgaagcgcatcgacaccatcgttatttccacgcagcacagcgaggctgtctctctggagcagattcgcaaggatatgatcgaatatgttgtgaagccgatcgttccggcggagctcatcgatgagaacacgaagtattatgtaaacccgaccggccgttttgtcatcggcggcccggtaggtgacagcggtctgaccggcagaaagatcatcgtcgatacgtacggcggcgtaggccgtcacggcggcggtgcattctccggcaaggacccgacgaaggttgaccgttccgctgcatacgcggcacgttatgttgcaaagaacattgtagctgcgggctttgcaaagaagtgcgaggtgcagcttgcatacgccatcggtgttgcacacccggtttctgttatggtcgatacattcggtaccggcacggtggaggattccaagcttgccgaggctgtgcagaaggtctttgatctgcgcccgaacgcgatcatccgcaacctcgacctgcgccgcccgatttaccgtcagctcgccgcttacggccacatgggccgtgaggagctcggcgtgcagtgggagcagaccgacaaggtcgaggctctgaaggctgccgtgctttaatttgcgcaaaacagaataagaaccgaatgcaccttcgcgtcatagactagcgcggaggtgttttttatggagcctatcgggattgctttggtgtgcgcgtttacgctgtgtatctttttatttgctgtgcggagcgtttgcctgcgcgtgacacgttcgaaaatgctggaggatgcgctgccgtttacggtgtatgcgacgattcgccgcgcggacgacgcagagtatattgtgcgcagtgttttggagcgcgtgaagtggctggatttatacggcatgtgccgcattgtgtgcctgaatccgacaaacgacccggagatcgacgcgattatccgcagacttgtgcaaaaatacccgtttgcggagattggggcttttcaaacacgaaagaatgttctataatagaagcgtagaaatttaagtaatgaaggcagtaatgtttcagtgaaatattcggctttgccgaatgtgaaataatacttacgtattgtgaaatttttcgcttgcgcgaaaagtgaaataaaacaaaccccaaaggatttgttttgatgataaatcaaggaggcgcaaccgatgccgcaggaaaacgggctgctggaaatggaaggcagcgtggaaaatatcgtctaccacaacgacagcaaccagtacacggtgttggaggtcgattgcggcgaagagctcatcacggtggtagggacgttcccgtatgtgagtgtgggggagcggctgcacctgtatggcacgtggacatcgcacgcgacgttcgggcagcagttccgcgcacaggcgtttgagcgctcccgtccggcggacacggcggcgatgctgaaatacctttcgagcggcgcggtgaagggcatcggcggcgcgctggcggggcgaattatagaagcgttcggcgatgaatccattaaggtgatcgaggaagatccggcgcggcttgcaaccgtgaagggcatcacgctgaaaaaggcgaaagaaatctccgaggagatgcagcgcgtgaacggcatccgcgatttgatggcattcctcggcagctttggcgtgcgcccggaggacaccgtgaaggtgtggaaggtgtacgggcaggactctgtggcgtgcattcaggaagacccgtaccggctgtgcagcgataagatcggcatttcgtttgcggtggcggatcagctggcggagtcgctggagtatgaccgcgacaacaaggagcgcgtgaaggcgggcgtgctgtatgtgctgcggcacaatttgaataacgggcacacgtgcctgccggcggataaactgtgcgcggcggccgcgaagcttttgggcgtgccgccggagagtgcgcaggaggctttacttgagctgtgccagacgtttgaggcggtgaacgagaattttagcgggcgtgacttcgtgtttttgccgaggcagcaccgcagcgaggtgtactgcgccgaccgcatccatatgatgctgcgctacccgccggaatccattacgggcatcgaccgggagattgcggaaattgagcgcacagaaggcatcgagtacgccgaattgcagaaggatgcgatccgcgcggcgctggaaaagggtcttttgattttgacgggtggcccgggcacaggcaaaacgacgacgctgaacgcgattatccgcattttgatggaaaaaggcgagacggtatttctggcggcgccgacggggcgcgcggcgaagcgcatgtccgagttgacgggcgtggaggcgaagaccattcaccgcatgttacaggtggactgggacgacaacgatgacccggtgtttcagagaaacgagcgcaatccgctggagtgtgacgcagtggtcatcgatgagctttccatggtggacgcgtatgtgtttgaaagcgttctgcgcgcgctgcccatcggctgccgtttgatcttggtcggcgacagcgaccagctgccgagcgttgggccgggcaatgtcatcggagaccttattgcgtcgaaggtattcccaacagtgcaactgaaggagattttccgacagtcgatggagagtctcattgtgatgaacgcgcacaagattgtagagggcgagatgccggagctttccgtgcgcagcaacgatttcttttttatgccgcgcgaggatgcgcgctccgtttcggagacggtgcagtcgcttgtggtgacgcgcttgccgaaaagctacgggtattcgccggtgacggacattcaggtattatgcccgggacgcaagggcgagcttggcacggtggagctgaaccgtaagctgcgcgagcagattaacccgcctgcgaaaaacaagccgcaggtgacggtgaacggcacggttttccgcgagggcgacaaggtgatgcagatcaagaatgactacaacctgccgtggagccgcgaagacggcacggtgggcgaaggcgtatataacggcgacatgggcatcatcatcgatgtggacaaagatgccgggtgtctgcgtgtggaaatcgacgacaaagaggtgttgtatgattttgagcacgcggcagcagaactggagctcgcctacgccgtgacggtacataagagccagggcaacgaatttacggcggtggtgatgccgatgttcccgggcgcgccgcagctgagctaccgaaatttgctgtatacgggcattacacgtgcgaaaaagctgctgattttggttggcaagcgcagtgtagtcgccgatatggtggcaaacgataaaaagacgcggcggttttccggcttgcagcactttttgctcgaaaagccggaggaagacgggccggagcagaatgaggaagcggaagcatgagcgttttagagaaggttctcacgttcttttacccgaagcgatgtcttttgtgcgggcgtgcgggagcggtgaacgaggacgagttgtgcgcggactgcgcgaagctgcagccggatattcgcgtgcggtttttcgcgttgcatgcaggaagacgggattacacactggaatgtcgtgcgccgcagcggtacaaggagccgtttcggtcatccttgtggcggttcaagttcaaaaacgggacaaaccttgcgaaaccgcttgcaaagttaatgttgccggcgatcgataaaaaccgggtttgggactgtattgtgccggtgcccatcagccgggagaggctgaaacagcgcgggtacgatcaatcggtgctgcttgcaaaagaggtatcgaagctgacgggtattccgtgccgcacggatattttggagaagacgaagcataaccgcacgcagcacaatttgagcgccaaggaacgtgaagcgaatgtgcgtggggcgtaccgcgcggagggtgcggcgcggctgcgcattctgcttttggacgacatcgtgacgaccggcgcgacggccgtggaatgcgcaaaggtattgtaccgaaacggggcggactatgtgggctgtgtttcgtgcgcgacggtcgattagaccttgcaaaacgggaaaaagtcatgtaaaataaaggacagtataacgcgagaggatggtaccatggccggtacggatattgcgatcgatttgggttcggcaaatttcagattatatgtagacggcaagggtgttgtggtggatgaaccgaacgtcatcgccgtagatgaagactctaaccgtgtggtggccgtgggccgccgcgcgtataaaatgcttggcagaacgagcgatcgcgtgcgcgtggtcaagcccgtgacgggcggtgtgatttccgatttgacgctgatggacgcgacgctgcagcattacctgaaaaaggtgacgaacagccgcgttttcatgccgcgcgccgttgtggcggtaccgagcggtattacggaagtggagcgccgtgcggtggtggacgctgtggcagcgaacggcattcgcaaggtgtgcttgatcgaagcgccggtggcggcggcgatcggtgcggggctggatatttcccgtccgcacggcagcatggttgtcacgctcggcgagggtgtgagcgacatcggcgtgctttcgatgaatcgcctttccgtaagcggcagcattgccgtgggcggcgcggtgttcaacgaggatattatcaaatacgcgcgcagaaagtttgacctgattatcggcgagcagacggcagaggcggcaaagtgcgccgtgggctgcgcgttcccgctgaaggacattgaaaaatacgagctgcgcggcagagacgagcgcaacggcctgcctgcaaaggtggaagtgacctccgacgagattggagaagccatgctggaatccgttgtgaaggttgtgcacaaaattcagagtgtgctggaggagacgccgccggagctgacggcagacatcggcaacgcgggcattgtgctgacaggcggcggcgcgaagctgcgtgggttggacacgcttatctcgaagcagacgaaaatgcgcgtgcgcattgcggaagagccggaggactgcgtgattctcggcgcaggacgcgcagtgcagtggatagacagcgtgaagatggacgcgggcaaggaaaacggcaatgtgccgctgaccgcgtattattaaggagcggcgtatggaaaaacgggtgccgaaaggccgcaaaatgtggacggtgcagatcgacgaaaacggcggtgtgcatattccgaaagaggccttggcgcttatcgggctgaaggccggggaaagtgccgtgctgacgggagacaaacgccgcgggttggtgcttgtggccgaaagccgcgcggaatcggtgcaggaagcctttttgaaaaacgaagaataagcttggcgcagaggaattctctgcgcttattttttacggaaatttgcgtgccggtcttgcgtgcggcgggttgcggcactgccgtctcgggggaaagtgaagctgcgcaagaagagcggggcattggggatataggtaaaagcagaataaatgaagacaaagccgggttatggaacgcggcttttgttctgcgaaaaacggcggggtgaaagcttccgaataaaaaatcaaaataggggttgacaaatgtatacgagtttagtatactatgagcaagttagtttatactaactttaaggataacacatagcggtgagaatccgctttatttaaagcaaaagagttagcgcaagctaacttaaatcaaatgcaaagcccggttttgcgggcggcctgtgaaacgcttttgcaggcggaaaggatagaatatgagcgtagtgatcgttggcggcaatgaacgcatggtatgtcagtacatggacatctgcaagaaccatggctgcaaagcaaaggtgtatgtgaaggagaacggctccttgaaaaagaagctcggcacgccggactaccttttgcttttcaccagcacggtctcgcacaaaatgatgctgagcgcttccaaggaagcgaaaagaaataacattccgatcgcgtatgtgccgagcagcagtgcctcggcgctgcacagtgtactggcagattgctgtgcggctgtgcgcggagagtgtgctttcaatgcttgagaaatacttgatcgagcattgtgcgccgacgctggcgtcgcttaaaacggcgagtttattttcctaccacgcggcgcaggacccggaggacgatgtaaagcatttgaatcgcatattccgcgataaaggcgtggagctgctgatcttaaagcgcgaagaaaatgcgatgctcatttatgtgtgccgccgcacgcagcttgcaaaagacctggagcgccccggcgcaaaagagcttttggaacgctacggctacaccgacacgagcgtggacggcgcgatagagcggctgcgcatgcggcttgcaagcggagacgggttcccgcatgagattgggcttttcctcggctacccggtggaggacgtgcttgggttcattgaaaacgccgggcaaaactgcaagtgctgcggatgttggaaggtgtactgcaacgaatgcgaggcagtgcgcacatttgcgcggtataagaagtgccgggacatctacaagcgcttgtggcaggaaggcagaagtgttttgcagcttaccgtagctgcctgacatataaagaaatttttgaaaagaggttacaaaaaatgcgtaaaacagcagttgtttattggagtggtacaggcaacacccagatgatggcggaaaaggttgcagaaggcgttcgcgcagcgggcgcagaagcagatgtatataactgcacagagttctccgcagacttgatggataactatgaggctgtggcgttcggctgcccgtccatgggctccgagcagttggaggacacggagtttgagccggtgtttaccgagtgcgaagcaaagctttccggcaaggtgatcgggctgttcggctcttacggctggggcgacggcgaatggatgcgtaactgggaagagacctgccttggtgacggcgcggtttttgcaggcgacagcgtcatctgcaacgaagcaccggacgacgaagcagacgcagcgtgcattgcgcttggcaagaagctcgcaggcgaataatttatagagtataacgtgtaataccacacatttgcgcataacaggatagaaaaaaaccgacggcatgagggaacttgtgccgtcggttttcttatacaaaaagagtcgctctcggaaacgggagcgactcctttgctgtttatgattacatggacgtcggaacagtgatgttgaacatggtgaggacgttgcgaatgaccgttgcggtggcgcggcagagggtgagacgcgcctgcatgaggctttcttcctcgccctttacacggcaggcattgtagaacttgtggaactttgttgcaagctcgataacatagcgcgtgatgcgtaccgggtcgtagtcctttgcggcgccgatgatctcatcggtgtaagacgcgatgtgctggatgagctcaagctcctccggcgcggtgagcagtgcgagctcctctgcggtgcagtcgcgcggggtgacgccctcggcttccaatgcgcgcaggatgctgcaaatacgcgcgtgggcgtactggacgtagtacacggggttctgggaatcctgctgcacggcgaggtcaaggtcgaagtcgagcagggagttcgcttcacgcatgttaaagaggaatcttgcggaatcgaccgggacttcatcgagcaggtcaccaagctggatggccttaccggtacgcttgctcatgcgcacgggctggccgtcacgcatcaaacggacgaactgcatgagaatgatgtcgagcttatcggcgctctgaccgatggcgtccatcgcgcccttcatgcgggcaacgtggccatggtggtcgctgccccagatgtcgatgagcaggtcgaagccgcggtcgaacttattcttgtggtaggcgatgtctgccgtaaagtaggttgggttgccgttggcgcggacgagcacttcgtccttttcgccgccgaactcagttgccttgtaccagacagcgccgtctttttcgtaagtgaggccgcggtcgcgcaggtaatcgacgacggccatgacttcgccgtccttgtgcaggtcgctttcgaggaaccagcggtcgtaatggacgcggtatttttccatatcggccttcattttcgcgatgttcttcggcaggccgaagccgacgagtgccttgcggcgctcttcttcggtgacgtgcatcagttcatcgccgtgctctttggcgtactctttggcgaggtcaagaatgtcttcgccgtggtagctgtcctccgggagctccggcggattttccgcgaagagctgctggtagcgaatggagagggagagaccgaatttatcgagctggttgccggcgtcattgacgtaaaactcacgccaaacgtcgtagcctgcggcatccagaacggaggcgaggcaatcgccgagcgcgccgccgcgggcgttgcccatgtgcatgggacccgtggggttggcggaaacgaactcgaccatgaccttgcggtggttgccgtagtcgcttctgccgtatgcgctgtcttttgtgagcacttcggtcagcacatcgctgtaaaacgcggagccgaggaagaagttcatgaagccggggccggcggtctcggccttaacgaagtaggtgccgttgaggtcgagattttccatgatagccgcggcgattttcgggggcgccatgcggaatgcacgcgcggaagccatggcggcgttcgttgcgaaatcaccgtgagagcggtctgccgggcgttctacagtgaaagcgggcagctctgcttcgggcagcatgcccgcagccatcgcttttttcatcgccgcttcaatgacggcagaaacctgttcttttgcaatgcttactgctttagacataggggatgttcctttcggtttatttattgaatagatcacgcttgcgcaggcgaacgcagatttcgttgctggaggaaagctgggtatcgatgtcgagcgtatagcggatgcacagctcaccgcccgcagcggaaaggtcatgctttaacgtctgtgtatatacaccgagggagagcacgcctgcgccggtatcataaaggcatttgtggcgcttgcctttttccagcaccagacgggtgggcgtgccgggggtcagcatggtgacggtatcctcattttcgattttgagcactttgagctgaccgttatacggcgcttcatcggcatattccgtgtaggagatatactttgcgccgccgcgctcggtgtaatcgccgagcgtatccacctgaatttcatcggtctgtgcgtcaatcgtttggcgaccgatgatggtgatttcgtaatcttcgcgcataatcactcagtacctttcaatatctatacattccacgcagctttcaacgttttgcccgaggaagagctcggcgactttataaaagctttcggtgtcgtcgctgacaaaatactgctgtgtgccgtcggttttgccgtcgcacagcagaccgttttcctccagcacggtgcggcagcttttggcggcttcgcgaccggaactgatgagcgtgacgttttcgcccatgacgcggcggatggtctcgctgatgatggggtaatgcgtgcagcccagaatgagtgtatctacgccggcttcacggatgggcgttaagtagcgctcggccgtcaggcgcgggatagggtcgtccggcgagacgaacgcgttttctacgagcggcacgaataaggggcacgcctgctcgaacacttcggttttcggcgcgagacgctcgatctccttgcggtaggagccggaagcgatggtggcggcggtgccgataatgccgatcttgccgtttttcgtttgctccaccgcggcgcgcgctgtggggcgcagcacatcaaaataggggacgggcagcgcatcgccgatgtcacgggcaacagagctgaccgtaccacaggcggccagcacggcttttacgtcgtgccgaatgagaaaattcatatcttgctttgcgtatttgcggatgatctcgcgcccgcgcgagccgtagggcacgcggccggtatcgccgaagtagaggatactctcgttcggcagggtgcgaatcagctcccgcatggcggtgaggccgccgaggccggaatcaaatacgccgatgggtctgttatccataaattgcgcctcgcgttagtctgcacgcgtgaaagcgcagtcgatgagcttttcaagcagcttgctgtacggggtaccggcgttttcccagagcttcgggtacatgctgatggacgtgaagcccggcagcgtgttgatctcgtttaaaatgaccttgtgctccttttcggtgacgaagaaatccacgcgggaaaggccgtcgcagccgagcaggttgtaggcacggacagccgtcttgcgcacttcctccgcaacgtcttcgggcagacgcgccgggatgaagagctgtgcgacgccgttcttatatttgtcgtcataatcgtagaattctgcacccgcaccgatctcgccgaccggggaagcgacgcttttgccgcggttgccgagcacggcgcactcgacttcctgcccgacgatgccttcttcaacgacgaccttcgtatcgttttcggcggcaaggcggatggcggcgtcgagcttttcgggagccgttaccttgctgacaccgacggaggagcctgcatttgccggctttacaaaaaccgggaaattgaggcgtgcggcgattttgttgcggatcttctcaccgtctgcgaaatagcggtcggcgtagaaccacaggtagtgcgcctgctcgatgttcgcggcggaaagcagcgtgtgggtgacggctttatccatgcacacagcggaagccagcgtgccgcagccgacatacgggatgccgctgagcttaaagagaccctgaatggtgccgtcttcgccgtttttgccgtgcagcacggggaagaggacatcgaccttcaaaacggtatagctgccgtctgcgttcagaacgacaaggccgttcgtcgctttatcgggagagatgaacgcggggcgcgcggtttcgctgttcatccacgtgttgttttcaatgttttccacagcacccgaatagagcagccagcgaccgtcctttgtgatgccgagggtgagaatgtcaaatttctctgtatcgagatttcggatgatcgaagcggaggacatcagcgaaacttcatattccgaagacgcgccgccgaagatcacgcaaactgtttttttcatgataaagggctccttcccgcgcagaaaatcactgcgcaaacacttttttgagtgttcaaaaagaattttcaaaagaataaaagaacaatataccagtagttttactcttttgccgtataaaatatgcgaatacacgaaacagatcgcgcacacgcgtcgccgctcgggcgatatcggtttagtataccatatcttccgtgttttttcaagcgctgtgcgggttttcggggcaggatataaaagaaaagcagcccacggcgctgcaaacacagagccgtggactgcgaaacggtaaaattattctgttttggaaaagcgagttagtcccacatcttgaggtattcgccggtgttgccttcaaggcgagcctgctcgagcgtgacttcgatgctcggtgcgccgagggtgatgcgtctgttctgatcattatagcaccaatgcacggcgttctggatgatgcggcggacgtacggattgtagaaggaaccgttcgtctcgtggcccggctggaaatagaagatcttgccgtagccgcgggtgaaggtgcagccgcggcggaagacttcgccgatgtggcttttgcataaaacccgactttgcgggcaggctaaagaagtcgccaaagtgcggcacgaacttagaaattcaaaaggaaaggatctggaccgatatgaacaagctgaaatgtagcgtgacgacctgccgacacaacgcaaacgacctgtgcgagctgcgcaaaattcaggtggacggccccgccgcgctggaaagccgcgagacctgctgcggctcttatgcagagcgcacggcttcctccgaaaactcctgcggatgctcgtcttcaccgagcgccacagctgatgtgcattgcagcgccgagcactgcacgtataacgataaccacaagtgcagcgcggactgcgtctgtgtgggttgctgttgcgcagacccggaggtcgtcagcgagacggaatgctgcacgtttgagcgcagagcgtaaccgtttctaaatcttcacatgtttcccttagggcggtgcggctttggctgtgccgcccttttctgttgctttttaccatgtttttcgatatactgtttttataaaccggcagagagggggagcacggtgatcgacacggaacgttttttacaggcgcgaaaagaggcgctggggcgcgttggcggagcaggcggcatcggtacgctttcggaaaaagctttgcacgcggcgctgaaaagctactacgaacccgattttgagagccgcgaagtgaaggtgggcggctttgtggcggatattgtcggcgaaaacggaatcatcgaaattcaaacgcgcgggtttgaccggctgggccgcaaactcgacgcgtttttggaagcggcgcgcgtaacggtggtataccctgtggtgccaaagcgcgggctgtgctgggtggaccccgaaacgggagagatctccgaaaagcgaaaatcaccgaaaaagggcgcagcgtatgatgttttcccggagctgtataagatcaaaaatcaacttatgcacccgaatttccggctgtgcatcccgcttttggaggtgacggactacaagtatctcgacggttacggtaagcaaaagaaactgcgcgcgacgcgtggggagcgtatcccggaagtactgctcggcgaagtgatctgcgagagccgttgggattatttgaatttgctgcccgaagacctgccggagccgtttacgacgaaaacgcttgcaaaagcgatgcgacgcgcgcagacgcaggcgcagtgtgcggcgaatgtgctgtattccatgggtgttttggagcgtgtgggtaaggagaaaaacgcatatttgtacgtgaaaaaactggaagaagaaaacttgacgaaagacttttagccatggttaccggaagcttaggcgtttaatttacggaagttcattttcagcgttcttgtactgcgcaggtgaggaacgttggcgtcggggcgatgcatgtatacgctttgtatcaggccgaagccgaggtacagacacacggcactgctgccgccggcggagaagaacggcaatgtgacgcccatgacgggcagaagcgccaggcacatgccgatatttgagacggactgtaaagcgatgagcccgaaaaagccgaagcacatgcagcgcccgaggtcgtccctcgcctttgacgcgatatacagcacgcgcaggagatacaataacaataatacgatgatggcggtgcagccgatgaagccgagctcctcgccggcaacggagaagatgaaatcactgtgctggaacgtgacgaggtttgtttcgacacgcggaccgttaaacagccctttgccggtcagctggccgctgccgatggagatacgtccctgcacctgctggtagccttcattgagctgaatagatgggtcgtccagattatagacagatgtgaagcgcttgatttgatattcgctgagaacgaatttccacagcacgggcacggacacggcgacaagcgcgccgagcaaaatgaaatagcgcagctgcacaccgccgccgaggctcatgcacaggaacatgaagaaaaaaacgatcgcggcgccgtcatcaccctgaacatggcagagcagaacgggcaccgccgcatggagcgcgagcagaacgacgtgcagaggatgattgattttattttgcacgcgcaaaacggagatgtgctttgcataggtcagcataaagcagattttcacaagctcgctcgtctggaacgtgcggcccgcaaggctgatccacgcgcgcgcgttgacgccctcgctgccctgcacgctgatgccgaaaagcatggtgtagagcatgataaaaacggaaaaacccgcgatgaggtaccagaacgacgcaatgctttcgtaatcgatgaaggagagcacaagcgccgcgagaaggcccgcaacggtcacgacgagctgcgttttgaaataatccgtgttcatcgcgcgggaaacgcttttcagaagaataaggctgaacgtggatattgtgagcatcaaaagccaaagaagcttgtccgtacggcggaaaaaggacgaaacagcaaggaaaatgcggctgtctttcgtaagatcacctgctttcaaaaaaattggaaggagccaaagtaaaacaaagcgtaaaagtctttgtaagacgttagaaataaaaagcaaaatttcaacaaaatttctattttagtatatcacacagaaaaggaaggggcaatatccagatttttttccgttaaaaaagcgcgttcctctttacggaaacgcctttttgcgctataatctataaggcataacgatgtccgcatgctgcggcgtgcggcaaaacggaaaagaacggaaatgaaaggttggttgcaatgcttaccgatattgaaattgcgcagcagacaaaattaaaaccgattgcggagatcgcggaagaactgcatgtgtgtcccgaagagctggagccctacggacgctttaaagcaaagctgaatgatgacctgttcaaaagacttgaaaacgagccggacggcaagttgatccttgttacggccatcaacccgacgccggcgggcgagggcaagaccaccacaacggctggcctcggtcaggctatggcgaagatcggcaaaaaagccgtcatcgcgctgcgtgaaccgtctctgggtccggtgttcggcattaagggcggcgctgcgggcggcggctacgcacaggtgttgccgatggaggacatcaacctgcacttcacgggcgatatgcacgccatcacttcggcaaataacctgctgtgcgccatgctcgataaccacatgcagcagggcaatgtgctgggcatcgaccagcgccgtgtgctcatcaagcgctgcgtcgatatgaacgaccgcgcgctgcgcagcattgtcatcggccttggcagtaaggtgaacggcatcccgcgcgaggacggctttatcatcaccgtcgcaagcgaggtcatggcgattttgtgtcttgcaaaggatttgaaagacctgaaagagcgcctcggcaaaattctcattgcatatacgtatgacggcaagccggtctatgcgaaggacatcaaggcggatggcgctatgacggctttgctcaaagatgccatcaacccgaaccttgtgcagacgattgaaggcacaccggccatcatgcacggcggtccgtttgcaaacattgcgcacggctgcaactccgtgcgcgcaacgcgcttggcgctgaagctcggcgattactgcattacggaagcaggcttcggctccgacctcggtgcggagaagttcctcgacatcaagtgccgtttggcgggcctcaagccgaactgcatcgtcgttgtcgcgacggttcgtgcgctgaaatacaatggcggcgtgccgaaggcagagcttgcaaaggagaatgttccggcgctcgaaaagggcattgagaacctgcgcgcacatgtggagaacatgcacaaatataacgtgccggtcgtcgtcgccatcaaccgcttcggcaccgatacggacgcggagctgaaagtcatcgacgattgctgcaagtccctcggtgtagagtatgcactctccgaagtgttcgcaaagggcggcgaaggcggcgtggagcttgcaaagaccgtctgcaaggtcatcgacgagaatcctgaaagccactttgcgccgatctatgaccttgatctcacagtggaggagaagatccgcacgatcgcgcagaaaatctacggcgcggatgacgtgacgttcacgaaccaggcgatgaagtccctgaaggacatcaaggcgctcggcggcgatgcgctgccggtgtgcatcgcaaagacgcagtattcgctttctgacgacccgacgctgctcggccgtccgaccggcttcaacattacgatccgtgacttgcgcctctcgaacggcgcgggcttcgtggttgcgtatgcgggcgatgtgatgacgatgcccggtctgccgaaggtgccgtctgccgaaaagatcgacgtcgacggtaacggcgtgatccacggcctgttctgatgcaacggtttgtttctcactcggtgcaggacactgagaaaatcgcggcgaagctggcggaaaagctcaagggcggcgaggtcatcgcgttcacaggatcgatgggcatgggcaagacggcgtttacgcgcggacttgtgctggcgcttggcggcggggacgtggtctccagtccgacgtttgcgcttgtgaacgaatacgatgcgcggctgacggtgcagcactttgacatgtaccgcgtttccggttgggacgatctctactccacgggctttttcgattacctcgatacggacaacgtgctcgtcattgagtggagcgaaaacattgacggcgctttgccggaaaacacgatttatatccacatggaaatgggcgagacggagacggagcgcatcgttaccattgagggcatagacctgtgataagtttctgatagaaaggacggcttttgcgcggcaaaaaatcgcgtgaaagcgacaaatatgctgattttagcacttgattcctctgcggcgccggcctcggccgcgcttttgaaggacggaaaaatactctctgaattttatatcaacacaaagcagacgcacagccagacgctgatgccgatggtggaatctgttttgaagctcacgaataaaacgcttgacgatgtgacctgcatggcggtctccgccgggccgggttcgttcacgggggtgcgcatcggcgtctcctgcgtgaagggactttccatgacgcggaacatcccgtgcgcgggcgtttccacgctgcgcgctatggcggagaacgcacggcagctgacgggtatcgtctgtgctgtgatggacgcacgctgcgggcaggtgtataatgcgctgttccgtgcggaggacggtaagctcacacgtctttgtgatgaccgcgcactgcccattgtggagcttttggaagaatgcaaaacgtttacggagaagatttatcttgtcggcgatggcgcggagctttgctataagacgtttgcggttatccgtgcagagcttttgctgccgcagcttcgctttcagcgtgcctccggcgttgccatggcggcgcaggagatgattgaaaacggacagacggtcacgccggacgctttgatgccaatctacctgcgtctgccgcaggcggagcgtgaactgaaagccaaaaacgcacagaaaaacaataagtaatccatatacgaaggagaataaagcatgaagatcgcagttggttcggatcacggcggattcgctctgaaagaagccgtcaagaagcatttggaagcaaagggcatcgaagtcgaagatttcggctgctattccacggagagcgtggactatgcggtgtacggcgcaaaggtcgcgcactgcgtggcagacggcaaggctgattacggcgtacttgtttgctccacgggtatcggtatttccatggccgcaaacaaagtgaagggcatccgcgcggcattgtgcagcgatacccacgcagcggaaatgacccgccgccacaacaatgcaaacgttctgtgtctcggcggccttgtcaccgaggagaagaccgcgctggaaatcgtggacacgttcctcaagtttgactttgagggcggccgccaccagcgccgtatcgaccagatcgcagatattgaaaacggacgcctgtaaggcagaaatcggagaaatcaatatggaaaacaacgaacagatttttatcatgaaccacccgctcattcagcacaagctctctttcctgcgcgataagaacaccggtacaaaggaatttcgcgagcttgtcagcgagatcgcaacgctgatgtgctacgaagctacccgtgatctgccgctgatggacgtgcagacggagaccccgatgtgcaccgcaacgacgaaggtcatcgccggcagaaagctggcattcgtgccgattctgcgcgccggtctcggcatggtagacggcatgctgcagctcgttccgagcgcaaaggtcggccatatcggtctttaccgtgaccacgataccttgcagccggtcgaatactacaacaagctgccgtccgacattgaagagcgtgatgtcatcgtgcttgacccgatgctcgcgaccggcggttccgcaatggacgcgatcaccattgtaaagcgcagccgcccgcgcagtatcaagttcctgtgcatcattgcagcgccggagggcctcaaggcactgagcgaagcgcacccggacgtgcatatttactgtgcagccgttgatgagaagctcaacgaacacggttacattctgccgggtctcggcgacgcaggcgaccgtatcttcggcacgatgtaagctttcggaaaagttaattttataagcaaacgctcatgaagtgaaaatgaagaaggagccgtacccgaaagcgggcgcggctccttcgatttttatgttttgcgttttgcggggggattacagcagacgcgtgtcgttgatgataagctcgaacgtgagccccaaaagatcggcggcttttctgcacagcaccatacggtcgaggaaaatctcgaaatactccatgacggggcagatgtccgtatcaatcgtgatgttgaaaaggcaaagcttctgctctttgtcaattttcagcgaggcgttcacgacggcgtaattcacgcggtcgtgaatatccgttgcgataatcgcgtttttgcgcacgcgggaacgacgcacgtcgcttttatcggagaggatcagcgcggcagagacggcgtttaccgggaaagcggttttctcatcgtggtgaccgatagccgagcagatgatagcgatttcttccggcggcatgttcatgcgcgttaaaagcgtgaacgccataatggcgccgctgtgcgcgtggtcgacgcggtttaccgtgttgccgatatcgtgcagataaccggcgatggcggcaagctcgcaggtgcgcgtatcgtaatcaagcgcttccagaatgttccgcgcgtagttgctgcatcgcttggcgtgcgggcggccgtgctccgtgaagcccagtgcgccaaggcagctgttgcccgcctccacgtagaccttcacttcgggatttttaaaaatgtcctccggcatgatatgtgcatattccataacggtgcgctcctgaattcaaaatcagtccgctgtaaacatgcggtacatggcttcaaggcagatttgtgcgtgcagcttgaactgctccacgttgatgcactcgtttgcctggtgcgcgttcgattcctcttcgtcgaacgatgcgccgaacgcaacgcctgcgccgcccatctggcgggcatacgtgcccccgcccatggagaagacgtcgcactttttgccggtgacgtcctcataagcgccggaaagcaggctgacgagcgggccgtccttcggcaggtacagcggcggctcatcggaaatgagcgtgtaggtgaggcctgtgccctccacggactttgcaaggatcttgtcaatctctgcgccggactttgttgccgggtagcgaatgtcgatatcgaagcggccctcgccgttttcgatgttcacaaggccgaggttgaaggtcagcgcaccgctcggctcatcggacatcttaacgccgatgttggagccgtcatatgcgaggccgactttctcatccatgaacgtgaggaattcaccgcagtctgcgccgaaaacgttcacgagcaggtgtgcaaggtgtgcggcggcgttgatgccgatctccggggtagaagcgtgcgcggccttaccggttgcgacgatgtgtgcgccgttttcggtgcgtgtgatgtcgaacttcacttccgcagcgtttgcagcttcgacaagctttgcaaattcgtcgtcatcacagagcacgtcggcttctgccttatacggcacggcgttgacaacagtaccggccttgaaggaaacgatctttttgccgaccttgccggttacggcaaaacggaacaggcctttttcgcagtggcacacgccgtagcaggcgtccggggtgaagcccatggtgggcatctgctctttagagaagtagtgacccatatcctgcatgccgatctcctctgcggagccgagcacgacgcgcagcttgcgtttgccgacgacgcccgcttccttcagcgcgcgcaggcagtgcagcgcaacaattgccggacccttgttatcggaaacgccgcggccgaatgccttgccgtcgcggatgaccatggtgtacgggtcgctgtcccagccttcgccggccggcacgatgtcaaggtgcgccataacaacggcgttttcttcaccctcgccgagctctgcgtgcattgcataatagtcgctgttcttcgtcttaatgccgtatcgttccgcaatttctatcgccttatccacagcggttgctgcgtccttgccgaacggatacgggccgtcctgtggctgtgcgactgagggaatggcgacgatgtcgccgaggtctttcattatatcgtcccagtaatcgagaattttttcaccgaacatgatacatttcatcctttccaaatgaatatacctctatcataatccatatttgtgttaaaatcaatcaaaactctgtaattttccgcagagaaataaaatgaaaggggagggtaggatgctgaacggcatctggatggcgatgattgtgctggcgttcgtcggtgcggtgtgcacgggaagatggacggcactttccgctgcggcggcggatggcgcaaggcaggcggtggagacggtgcttttgctgctcggcgcgatgtgcctttggacgggcatcatgcgtattgcgggggaggcgaggcttacaaacgggctttccaaaattctgtcgccggtcatcaagcgactgtttccgaattacggaaaaaatgaaaccgtgcgcgaaaaaatatcgatgaatattgccgcaaacatgctcggcgtgggcaacgccgccacaccgtttggattgagcgccatggacgaaatgcagaaattacagacgggcgacgtgccgacgcaagagatgattttattcgtcgtgatgaatacggcgtcgtttcagctgatcccctcggcggcggtcaccttaagggcttcctacggcagcgcggacccgtatgatattctgccgcatatttggcttgtttcattcggcagcctgctcgtctgcgtgctgatgtgccgcgtgtttcaaaaattgtggcgggcataggtgcggcggctgtctgcggcgtgatcgcgctcacggtcatgtgcgggtacgtaaaaggactgccggtatttgagctgttcacaaaaggcgcggcggagggcatgcatacggcgataaaattattgccgacactgctcggacttattgtcggcatttccatgctgcgtgcgtccggctttttagagctgttttccgcgctgctgcagcccgtgacagaagtgctgaatatccccacggagcttatgccgctcatcttactgcgcccgctttcgggcagcggctcggtgtcgtatgttgcggagctttacagcgcatacggtgcggacagtgtaatatcccgattggcggcaattttatcgtcttcgacggaaacgacgttttacgcggccgcggtatatttttcgggtcggggatataaaacgctgcgctacacgattccggcggcgctttgcggcgaccttgccgccgtgctgctcacgctgctttcggtgcggctttttgggtaaaattttttctgtacgtttttgtgtttttgtgatatactgctctcaaagaaatttgttttcggaggggaaaggtatgctgctggcactggacgtcggaaataccaacatcacactgggtgtttatgagggggaaaagctgctgttcgtcacgcgcatggcgacgaatccgccgcgcatggaggacgaatacgcttctgcaatgctcagcattttacatttatacaatatccacacctcgcaggtgaacggcgcggttttaagctccgttgtgccgcggctgaccgatgacctcgcccgcgcggtgcgccgtgtttggaaggtggaaccgttcatcgtcagcgcgcagtctgtgccggagctgaaagtgaagcgcgatgtgccgaacacactcggcgccgacctcgttgtcggtgctgtggcggcaaaagccatgtaccacggcccgtgtatcgtcatcgatatgggcacggcaacgacgctgacgggtttaaacgccgacggcgaagtgtgcggcgtagtgatcattccgggcgtcggcacgtcccttgacgcattgacgagccgcgcagcgcagctttcttccgtcagtctgaccgcgccgccgcaggtgcttggccgcaacacgatggagtgcatccagtccggtatggtgttcggcacggcgtgtatgctggacggcctgtgcgaccgcattgaaggtgagctcggcgcaccgtgcgaggtggtcgcaacgggcggcctcgcaggtcttatcgtaccgcattgcagccgcaagatcactttcagcgatacgcttctgctggacggcctgaaaattatctgggatgcgcacggggaaaagtaaaataaacgaataaggcagtgccgaatattcagggcactgccttaacgttttctttcggttgtcagtcttgtcttgccaatagaaacgctatatggtatactataaaatacgatttttctgcaaggagactacattttcatgaaagaaaagaaaaagatcccgtggggtcttatatacgtggggctgacggtggtcgtgatgatcgtgttcgggctcgtcaataccgaatttgcgggcatgttttccgtcatcgcaaatctttctctcgggtttgtggcgctcgccgtactgatgaccggcgtgttcctcgtaacagagggcggcatcatccatatgctgctgcgcgcgcagggcgagcacgtcggcttttggacaacggtgaagattgggctcattggcatttattattcttacatcacgccgagctccacgggcgggcagcccgcgcaggtcgtctatctgaggcgcgataaggtctcggtcggcaactccactgcggtgctgtttgtaaagttttttgcgtatcagcttgcgtttgtgctgtgcacggtggcatcgctgatttatatgtacccgcgtttgaagcgggacgacccgcagctcattcccattgtgctgctcggcatcgccatcaacgggctgtggattatcgcgataccgcttctgttcagcccgaagatcttaaaaaagctgtgcggcggcgtgacaaagctgctcttgaaatgtacgtttctcaaaaagcgcgagaattacatagaaaaagtgcacggctttgaggcggatttctcctcctacacaatgaaattcagaagcaaaatgcgctatgtgttccttgcgattttgtggtcgatcccgcaggtcattttgcagatgagtgtgctgtacgtggtgttccgcgcgttttcactcgacctgccttacggcgaactgctttgtatgcagacgatgctgcaggcctccgtgtgctttatcccgctgcccggtgcatccggcgcacaggagctcggcttctccatgttctttaaatcgtattttgcgtccggcgatattttgtacaccgccgtgcttgtctggcgattcttcacatattacatcatcgtgctgctcggcgcgctcgtcgtcgttatcgatcagctcgtgtttggttgccgcagaaagcaggaagcggcgctctctgcgggaaaagaataattcgacttgcttcggcgcagctcgtaggagttgcgctgtttttatattcttttatgacatattctcatgcgccggaaaacattgacatttttctgccgtgtgtctataatgggctcggcggctgaaattcggaaaagccgcatttcagccgtgaaaaagaagaaaaaggagaaaaacacatgctgaacattcaaaactacacaaagcgcttcggtgacaaaatcgccgtagacgacctttcgctgcacattgcggcgggggagatctgcgcgttcatcggacacaatggctcaagatacaaactgaaaatatctactatctaacctcctatgagtatggagataattatacatggcgtactatggatctttatgtacagctagtagcctgatttatatagggattatctaaaagtataagcctcctgtgattaagttatttaagactttcacagaaggtaattttttatgataagagtacagcgactagaaaaaggtacttattttgataatgcctatatgatctcttttcggtatgatcctagaacagtggcaaaggtaaaagagctggctcagaggcggtacttgcctgaggagagagcttgggagatccctgattatgagttacctaacctcattgaaaaggtggggctcagtaatattgatgcggatgaggcgataacaggagctctcaaaactaaagaggtagaggatcggagggcggctactcaggagaggcttgagggtatcaagcctgtagtggattttgattttactacagagcccctccctcatcagattgaggctttcaattttgggctacaaaaggatatgatcctgatcggtgatgagcaaggcttagggaaaactaaggagagtattgatatttgtgtagctagaaagcatgagcttgtaaaaaccttgatagtatgcggggtaaattctgtaaagtataattgggagaaagagatccagatccactctaaagagagctcctgcatgatagacggtaaaacaatggatctcagagcctctcagctctatgagtggtataaaagccctcattactttgggattatcaatattgagagcctgaggaaagaacagatacaggataccctctatgatggtatcagagagggctatattggggctgtaatcgttgatgagatacataaggctaagaatggtcaaagtcaacagggaaaggctctgagaacgcttaaaacgcctatcagaatagggctatctggtacacctatgaataaggcggaggatctctggaatatcctcacatggctaggggttgaaaagaggagcttttacagtttcaaaaatacctactgtatcatgggtgggtatggcggctataaggtggtaggacataaaaaccttgagagcctcaatgctgagctcagtagtgtaatgctgaggcggcgtaaagatgaggttttggatttgccgcctaaagtgcatagtactgagtatgtggagcttaccagtaagcaacagctcatatacagggatattaaaaatgggatcatagcggatctggagaatatcttgttatctgtaaatcctcttagctgtaccctcaggctaaggcaattaacaggagggctttttacagaggaaaatcctaagctagagcggctggaggatatgctcagtgaggagattatccctaatggctataaggctatcattttctctcagtggtctaaaataactgaggtgtaccataaagctctccagcggtataaccctatttacattacaggggatgtatctccagaggatcggctcaaagaggtagagcgtttccaaaatgatccctcttgtaagctggctattggtactattgatgctatgggtacagggcttaccctaaataaagcctcctatgtgtttttcattgataagaaatggaatagcggagataatgctcaggctgaggatagggctcacagaataggcacggctggtacagtcaatgtaatttctctggtggctaagggtacggtagatgagggtattgaggagtacctgattgataacaaggatctttttgagcggattgtagacggaaagggatctaaggcagatattaggcagatcttaaataaactcttgaaattatgatacagggggtatataatattatggagaaaggagagctgattacatgaaagtgattactatagatgagaatactggtaagagggtgtactccagaaaagaggtagctactctgtgtgaggtatctactcaaactatccgcctttgggaggatgctggggctatccctgctagtaccagagatgataacgggtacagatattgggatgaggatgctctttctcagattaagcagtatgctttattgtcggtgagggagcggagaaaaggtaagtaagtactcaaagagaggggcaaaaagctcctctctatttttttttgcctaaaactgaggaataatcaggggctatctaaaaaatcccctcttagctgattaggttaagtatctctcaaagagaaagaaatcatgtaaggaggagcgtatatgttaaaacttgtttttactcatgcagaggtacgggatagcggctttgggctggaggtaaacggtaagagccttgaggatattatctctgaggctctggggactaaggcggaggggctgagctacaatgatcctaagctgaaaaagtttagctctaattcctgcgatattaccgttatgatttgccctcatgacaaggaaaccctgatcgaaactgataaagaggtttttcacagtctgaaagagttggaggatgataggcgtgagcggtttgcagaggaaactggagaggcagaaagcgaaagctgagggtaccctggtttacaaaaaggtagcggctagaaagctggggatctcagtagcagagtataaccgccgtatgaaacggcgtgagaaaaatctaaaagaaatcactggaggtaatgaaaatggcaaaggataactttacagcaagggtatcagctctggagattgagctggggatgagcgtacaaaacaagagcgggatctggtgtaagcctactgtgcgtatgaatatcgctattgatggcggcactgatcctactcagcgtggggctatcatcaaacaggcttttgatgaggtatgtgagaatatcgaaaaggtaatctctgagatggactaaaactcacagggggggggtaacactttgcccctcccctttttctgggaggtaagcaatatgaaaatcaaaattattgagttaaatcctgtaatttggaaagatagcaatatctcttttggagctatgggattgtatttatgtttaactgaggtactcataaacgagatcccacaagaggatcttggattgataccgctaagcaaaatcttagacttttgcgaaaaagatacccctgaggatattttagcttatttagatgagctcaaaactcacgaatatattgaaaagtatttgtagggaggtaattttatggagcatagttttaatatagaggttgctaaaaaattaggggtagctccagcaattatccttaataacctttatttctggattgagaaaaacaaggctaatgataaacatttttacgatgggtattattggacttacaatagcagaaaggcttactgtttacaattttcgtatttcacagaaaggcagatagaatatgctttaagaaagctgatagatggagggtatgtgattacaggaaattataataaagtttcctatgatcgtactctctggtacgctatcacaaaagaggggtattccattttacaaaattgtgaaatggaaagtacaaaaatgcaaaatggatttgctgaaaatgttgatcctataccagatagtaacacagatataaacacagaaagagaaagtaagaaagcggaaacagagagttatgaggatattattaattctttagtggaaaatgcagaaattagagaggctctttttgagtttatcaagatgagaaaacttataaaaaagcctatgactaacagagccttaaagagaattattagtaaattgctttctctcgctggaaacgatgctgatttagctactgctattttagatcaaagtattgtaaacagttggcaagatatttacgccttaaagagtgattataaaaagaaacctgatagtaagcctagagcctctatggagaggtttgatcctgataaagataagctggctactggtacagatggtaagccgctggtgtactgagattagaggagagcctaaaaactctcctctaattttttgcctccagcgtgattaggttaggtaaagagtgtaggtgctccctacacggttaggaggttttagcggtgcggtgctatgcagaggattattgcaaaaaagatagagctgagtgtagtgaggtatgcggcgggtatcgtgtgctcagggctctttatcggctcagcagaataccagtaacttatagctattcaatacctctttctcctgatgagggggatgtagaggcttttgagaggctcaatgattttaaggagcacattgtacagaatgtttcagaggggaaaaacctttatatctggggaaaaagtacagggtgtggtaaaacctcatgggcttgtaagatcatgggctattatttccgcaaagtagcctttgagagcggcttagaaaatgaggggctgtatatctatactcctactttccttgaggatctcagaaactcctatagtaatcctgatgaggattttgccgaggtgctggagatgctgaaaaagtgtaagctcctgattattgatgatataggggctgaaaaggttacagagtgggtaagggagcggctggtaagcattatcaataccagagtgagcggagggctcagcacaatttataccagtaatctctcccctaatgagctggtatctcagtttgaggagcgtatagctagcagagtgctggggtgctctcagattgtggagatcactggtaaggatcggaggggtatctaatggctggcatgattgagcaaagtatcataagcaagctcttagagggcggtagcttagatgtgttacatactaacagcgtgagccctgagatgtttcttacctgtggggatgagatagcttttatccttaagcactatgaggaatataagcaagtacctgataagattacttttctctctgagtttagagagtttcagatgcttgaggtatctgagagtatggattatctggtgtataagctcaaagaggcttacacttacacaaagatagtaccgattatccaaaatgcggcggatcgtgtgagagaggatagtattgatgctatcacttacctcaaagagcaaattgctcagcttgaggcggatgtacctgttagcggtaataaggatggctatgatattatcactaatgctaaggatcgctttgcagagtataaaaagcggtgtgaggtaaaggggcttattggtattcctactggtatccctaagctggatgagcttactaatggctggctctggggtgaggagctggtagtaatcacagggcgtacaaatgtaggtaaaagctggatggctgagtactttgctaccatagcctataatctggggtacaagatccttttttactctggagagatgagtagagagatcataggctttaggtttgatactctcaataagcacttttcaaacagcggtttgcttaatggtgctggtactctgggggataagcctgataccgatggggggagctatctagctgaggattatgagaattatatcaatcagctctctcagaaaagcggctttgtagtggttactccagatgattttaatgggcgtaagcctaatgtggatgagcttaaagagctgtctgtaaagcatggggcggatatgattgtagtggatcagctctcccttatgagtgataagagaaaggctgatataccccgtatagcttatggcaatatctcagaggatctctttttgatgagtaaggagcttaaaaagcctgttatcctcttagctcaggcaaatagagaggctgtgaaaaatcgtaaaaagggagagagccctgagctacatgatctggcggagagtgatctggtagggcaaaactccagtagagtactctccctctctgtgattgatggcactcttaagattgccctcaaaaagaacaggtacggcttgaataacaaagaggtactcatgatctgggatattaacactggataccttaagcccctcctccctgataaccctgaggaaaaaactactaagggtgatgagaaagcggctgaggcggataagggcggtaaaaaggactatggtttttaacaaaaagaaaaactaaatattttgtatgtggctctctaaaaaaagcctccttttctgcttaggtttgattatcacagaaaggaggcttttgctatgagtacattagacagtaaagcggtagctgagatgctgggtaaaaggcatgataactttatgagagatgtgagaaagtatgtagctaccttgggtgaggtggctcctgagtacttcattgagggtacttacaaggatgggctggggaaaacaagggcaggataccagatcactctcaagggctgtgagtatatcgctggtagggtgatcggcgtaaagagtgaggagtttaagagcaagtatctccagatgttccctgaggctcatgatgagcctgtagagatccctaagcctgaggcggtacacggttactctacagaggaggtagctcagctcttaggctgtagccgccgtactgtacagagaataatccagcgtggggagatggctactactcaggttactatcatggttcccgctactagaacggttgtaacccctgaggagcttgagcgttaccagaaagagagggcggcggtatgttaattgataaatggagattagccgcttgcagggtacaggctggctacactcagaaagaggtggctaaggctctgggggtaacagagcaaactattatccgctgggagcaaggtgcctcagctcctaagatggagtacgctcagaaactcagtgagctctaccagatccctctagcctatatggattggacgaaagagggaaacgctacccctatgagggagagagtgcctgagctgggaggcatttagggcaaaagaaaagaggagccctaaggctcccctcccctttgtctgttagtctttgggatacagttgcaagatccttaatgctatccctcttactaacagcttatcctcattagataactgattgtaaatctcaatgagctcctttaagagtggatctggctttggctcagaaagagcggtaaagctgtaaaactgggagataggtgctcctagataatctgaaatggcttgcaagttatccatatcaggtagatgcttaccgttactccatgaggagaaagtagtaggcggtactcctattgcctctgctatctctttcttggtttttccagatacagaaatgtagtagttcagagctcttacaaagttatctgttagaggagatttagcactcaatgtatcacctcccctctactgtgagtgcttgtattatactatatttcagtagaaaagtaaagagaaactcaaaagaaatttagaaaaactcaaattttctattgacaggcagtagcggtggatgttatactgtattccagtagacagggggttataatggggagctacactcttttttttacctatcgactactggaaaacagtagttttaggataaattctattatattacaggaggtaaaggacatggatcttaaagagctgtatgaggtctacaagagcaaaaagttagcctttgaacaggcaaagaaagaggaggaaaagtacaaaaagctcctcaaggatgctatggctgaggcgggtgaaaaggatcataccgatgaggcgggttatctgtttgagcggattactcagcagagaaagagcattgatgaggagcggctcttaggtgagctccatagccgtaagctggaggattgtatcagctttaaggaggttgtggatgaggatgcgactatggcggcggtagaggctggtaggttgcctcaggcggttgtagctgagtgcctcaaggtacaagaggtggtagtactcaagctcacagctccgaaaaagggagctaaaaagtgattacagtgtggggtactcccattgtagctacggtagagcaagtggtaacggatctcaagctggagcggtttgaggatggcttactcagagagatcaataacacaggggcggatcttatgtgtacttgcccttttcataaaaacggcaaagaaaataagccctcctgtggagtgctcttgagagagaagatcgacaaaaaccgaaagtttgaggcgggtactgtacattgttacacctgtggctatacagcggatctacctcagtttgtagcagattttctagggctctcctcccctgtacaaggctttaagtggctggtggggcggtataactacggctcagcggagagggagcccctagagttaaatctctacagaggacaagctcagaaagcctcctacatggatgaggctgaggtagagcggtactatcaggagctcattaagagctctccagcgtgtgagtacctacagcggagagctctccctaactggatcattgatgcctataagctggggtttgatcctgatggggctgtagtgcttttccccgtaagggatatgagcggtaaggttgttttctacaaagggcggagcattacaggaaagcatttttacaatgcaaaggacattgataaaacctctcagatatttgggctttgggagctctgtaatgggcggttttctcagggggtggctacctctgagagtgagatctggattactgaaagtgagattgatgctttatctctggtgggctatggcaagtatgcggtagctatcatgggctctcatatctcagaggctcagtgcaaagagcttgaggctaccccttttaggcggtttgtactggctctggataacgatgaggcagggcgtaaaggagcggctcagatcaagcggatgctgatacctaagggctttaggtttactaatctccgctgggatacggatctcaaggacataaacgacttaataaagcggtttggagatggctgggagagctatctcacaggatattaaaggaggatacaggatgtttacaggaaagaaactcagtaatgaggagttggtacttagttaccgtgatacaagggatgaggggtacttagcggagctcatgcggcaaaacaaagggcttttgtatatgctggtggagccgtttgtacatagtattcctaattctgagttagaggatcttaccagtgaggcttacataccgatgcttaaggctattgaggattttgatgaggctagagggcttacctttgctaatctcctcaaggtgtatgtaagacagcacttaagccgcctctacaatgaggctaccagaaagaaacgctttacaggctctactcctgttagctatgagagccttgcagagattaaccgtgagggcggctctgagggagatagctcctttactgtagagtgtgaggattttaaggcggtagagtttatggatctggtgagatcgctggggctcaatgagaaagagcaagttactgtaaatgtactcatgagcggcggtactaagggagaggtagcaaaggctctacagtgtacccctgctacagctaactactactttaagcagatccgcaaaaagtttgtattggctggatatgcactctaaaaaatcccctcttagctgattaggttaagtatctcagaaatatagcaaatatcagaaagttaagggaggatgaacatgagagcattgagtacgctgatggcgattatcaaaggtaaagctatcgtgctggtaaagcgtgatgagcgtaaggcggatgtgctggtaggcagagagattactaagcagtttgcccttagcagtatggtaggggctgtaaaagccctgctgtaagaataaatcataacaacaaatttacaggaggtaaaggattatgggtttgcaggatttgattaagaagtatgataacggcggtttttctaaaactggctggtttcagcttaaggatgatggagatagtgcggtagtacgcctcctccataagggtgaggtaggagtagatcctcagactggagagcctgattatgattttcctatctttgaggtacataagctggatgtggatggctctgggcgtgatcgtactgtactctgtaagggtgagggctgtgagctttgcaggagcggcaataagcctagcctgaggatgttcctccagatggttaatctggatgagaaagataaggataagcaggtacagctctgggagcgtgggctcactgatattaagcagatgattgggcttacctctgagtatggggatctcactaagcggaatatcaagattgtgagatctggtgctaagggctctctgaaaactacctatcagtacttccctaaagatcctactgatatggatgtacctgagcctcagagcttggtaggctccctcattctggatctgaataaagaggatcagattaaggctattgaggggcggctccagctcagcaagggtaaggatgatggagagggctctggtaagggtagcggtagagcttctgctaacagagtattctaaacaggtaaaagcggtggggaggttagagatagcctccctactctcataaaggaggtaaaggatagtggctagagagatagctattgatgtgagccgtgaggcggtatcctttgaggatattagtagccgcttagctcataagaaaatcagtaatgtagcagtaaagagaaatcgtaacactcttataaaggctctggaggtagttaaggagctggtaaagagcggtaggctcaaggcagagggtgagattgaggttatccgtacttctgagcggctcagggagtttatggatcacgctagggctaatggtgagtatgtagtggatgtggaaactacggggcttgatgtgtataaagatattctggtgggtatctgcttatttactcctgatgagcctagtgcctatgtaccctttaatcatactgatcttgaaaacaagcgggtagcggggcaaatgactgaggaggagtgtaaagaggttatgctctcctacttagctgatcctgatctcaagtgtatcaatcacaatataaagtttgatgataaaaactttattttccagtgggggcaaaggatcgctaatgtatggtgggatactgagatagcggcatgggtgctcaatgagaatgagcctcacggcttaaagcctctttataacaagtatatccttaatggtgagggctctgatgaggattttggggatctgttttcagatattcccgctaactatctccccattgatatttttagtatctatggagctaatgatggtttcaaaacatgggctctctatcaattccagaaagagtatctttgtgaggatgctgagcggatagattaccagaggctctatgaggttttccgtaaaattgagatgccgcttattgatgtgtgtgctgatatggagctgagaggcgtggagatccgtgaggagtatgctaaagagctctctgaggtattcaatgcagagatggtagaaaaagagcggctctgtgatgagtatgtaaagggctttgaggagtatatcaaggatcatcctactctcatgaggcttacaaagggtacttgtaaaatcaattacaatagccctcagcaaatggcttgcttactctatgatatttttgggcttaaggcggtaagtcgtaaggagcctagaggtactggagataagatcatccagcaacacaggagaaaggctaaaaaggcgggtactaaaaagggtgagcggtttgtagagtttctggataactaccagagatacaaagaatgtggaaagctcttaggtacttacattgataagatccccgctgtaaaggatgctggtactaatgcggtacatactacctttaatcagtatggagcccgtacaggcagattttccagctctgatacggttactaaggtaaacctccagaatatccctagtcatgagaaacggatcagaaagatctttagggctagagagggctacaagctggtgggcggagatttttcacagattgagccccgtgtgttagcctatgtttctggggatgagaatatgatggaggcttacaaagaggataaggatctgtatgctatcatgggctctaaggtgtatggtatgccttatgaggagtgccgtgagttttatcctgatggctctgtaaatgcggctggtaaggaacggcgtaccactatgaaaagcgttttgctggggatcatgtatgagcgtggggcggcggctatcggtgagcagtttgataagagtgctcagtgggctcaggagctcattgataacttttacaagagctttcctaaggtggctcagctccgcctccagattgagaaaatggctgaggagtacggctatgttactactgtttgtggtagaaagcggaggctccctgatatgcagatccctaatcatgatgattacaagtatcaggaggctcataggcagagccttaacagcgtgatacagggtagctcagcggatattatgaaactggctatgatcgctatttataacgatcctcagtatgaggctctggattgtcacatggttattaccgtacatgatgagcttattatggaggtgcctgtagaaaatgtgaaagctggagcggatctcttagtatccactatgaaacgggtggggcatggtcttattgatctccctatgagcgtggatgctgaggttactgattgctggtatggtgaaaatctggctgatgagtttttagaggaggagtaagggtgagcactgtaaaagagtatgagaaactcttaaaggctgatgtacctcctgtaaagctgtgaagcaaaaacaagagcggtaagtgtgggatgtgcggcgtaaaggttaaaaagctccaccctcacagggtagggcaagtagacttttatgatctgtagtaactgtaaaatgataatggatatgtgatctctaaatattcctcctttttgagcttaggatgattactactcaaaaggaggaatatttttatatgcgttacatgggaagtaaaaaccgcttagcaaaggatattgtaccgattatccagagctatattagcggggggggtaagcctctacatagagccttttactggaggggctaatgtgattgataagatccagtgtgagcggcgtataggttatgatatagagccttatgttattgctactctctcagctttgcgggatggctggctacctcctgtagatgtatctgaggaggagtacagggatgtgaaagagcacaaaaagaaataccctgattattttgtggggtattgtgggtatcagctttcttatggtggtaagttttttgattgctacaggcgggataaagtaggtaagcggaattattccagagaggcttataatttcacgcttaagcaagtgcctaagctcaagggtatagagtttggggtaaaggattatagagagcttgaggatattgagggtgcggttatatactgtgatcctccctacaggaatacaggcaaatatacagcggtggggagtttcgatcatgagtatttttataactggtgttttaagatggctaagaaaaatacagtactggtatctgagtactggctaccagatggatttaaggaaatctggagtaagcctgtaaaggtttgcttagatagtaccagatctcagggcttgcagaaaatagagcggctttttgaggtaatctaaataatgcctccctttgtgattaagatcagcaaacagcaaagggaggttatcttttgagagtagatattttcaacacagataaaaagtacaatgtgatttatgctgatccgccgtgggaatataggcagagcggcggtaagaaaggctctaggggtatggcaaaaactcattatgatactatgagtacggaggaaatctgtaagctccctgttaggcagatagctacagatgattgtatctgttttatgtgggctacattccctaatattggggaggctcttaaggttatggaggcttggggctttgagtataaaaccgctggctttgtgtgggtaaagctcaataagaaagctccctctcttttctggggaatgggggcatatacaagagctaatgctgaggtatgccttttaggtatcagtaaaggtactaaggctaagcaagtggttaaggataacggggtacatcaaattattgagagccctgtagaagaacatagtaaaaaacccgccgaaacaagaaataggatcaataagctcttaggttgcggggggggggcatacaaaaatagagctctttgcaaggcaaacagtagagggctgggattgctggggaaatgaggtgtagagtatgaaaaaaggttgtgcttactgtacagatatgcacttgaggagatgccctgatgcttttactgagctggctcccctttgcgggaaatttgataattcagagatgcctcaggtatcggaaaagagaaaatataccatttatgcggtagattttgatggtactctctgtgtgagtaagtttcctgagataggggctcctaatatggctctgattaaccgcttgataaagaggagagctaagggtaataaggtgatcctctggacttgtagagtaaatgagcggctggatgaggctgtagagtggtgtaaaaagtttgggctggagtttgatgctgtaaatgctaatctccctgagatggtagctcattggggaaataaccctagaaaggtgtttgcagatgtgtacatagatgataaggcggtaaataagccttgttatcaagtaccttatgaggaggggctttgagagcctctccttttctttatctaaaaatagggctggtatctgattaggttaagtatcacaaatacaggagggttataggatgggcttaaagagcttgattaaagtagcagagggcaaaaatgccgctaatgtaacctttgaggataagtttatcaaagagtatgaggcggcggtacataggcaggatgaaagagagcggcagggatacccctctgattatttccgccctagctctatgtatgggtgtgagcggatgctctttttccagagagtgcatagcggctctgagggggatagcaaggatactaacctcattgagatctgtaacagcggtacagatagacatttacggatacagcacttagtagaggatatggagggtgttaagtgccttgatctggaggaagtagttaaagaggctcagcaaaagggcattaaaacagagtttgtaggctggaatgaggatcatacagaggcaagatgtaaaaatgatgagttacacattttctttcagcctgatggggttatcaattttcaaggtaaggatgtaatccttgagatcaaaacagagagcacttatcagcactctaaccgctatgagccaaaagaggatcataagtatcaggctacttgctacggtatggggctggggattgattatgtgcttttcttttatgaggatcgtaacttttgcggcaaaaaggcttacctctggaaaataaccgatgagatgaaagctactgtactcagtaagatccagcgggttactaaggctctggagatcggtactcctcctgagaaagatgagggcaagtgtacttactgtatgtataagcatgagtgtaagctggctgatgctggtacatggaaagatcctagagagcctaaggaaaagcctaagaaagccgctaagggctctaaaaagagtacggcgggtaaatctaccactaagagaaagaaagcccctacaaaggctcagagcggctctgtaaagggtgctaaagctggaggtggagagagtgcctgagaatggtaaaggaataggtaagatttttgaggcagagataagagcctctttcccctctgatttttatattgagaggtacaaggatgataccgctggattttacggggtaagtaatccagcggattaccgcctctataagtaccctcttacctttttgctggagcttaaaactcataagggtaagagtatccctttagctaagattagagataatcaggtaaagggaatgtacagagcctctcagcataaggggatctatggtgggtttatcctcaattatagggatttagaggaaacctactacatagcggtagctcagatggtggagtttatcaatgctggggaaagaaaaagtatccctgtagagtggtgcagggagaacggcattagaatagctcagcataagaaaagggttaggtactcttatgatctggctgagtggttagggaggtattttgatgaaagttactcagtgtaaaggagaggggcagggatcttgtaagagatgctctgatagaggcaagtggaatagaaattggatgtgttttctgtataagatagagggctatgaggggtgctactgtgcagattgtgtaaaagagatagaggcagaggtaaaggagggtgataggcgtggtacagagtgaacgcctcaaggcaattatcaaagaggtgcaggaggagagtactcctgtaatccagctctctaataagctcatagaggcttttagtaatgagctggatagtgctatctctgagctcaatatgattatggagagcataggagaaaacagcatagaggatatacctgatactcagattgagtactactgtgtaaagatccccgctctgatgtactatgcagggcaaagagtagaggagctggggatgcaagcggatcttgccgctaatgataacaaggtagctctcaatgaggctctcctcaaggtgagcggtacagtaccagagaaaaaggctagggctgagaaaatcactgaggataaggctctggtagcggctatttacaagagagcctataacactctcaaggttaagctggagatggctgagaaaatctacagtgggctaaagaaatctctcagtaagaggatcgctgaggtggatctggatcgtttcagtaaagataaatatgtgagggagagggctgaggatgatgagtaataccgattatgagagcctctaccatacttgccgctggtgtaagtggtatcaggatggcaagtgtgtaaatgaggcgtttgctggtactcagatagatgctgtgggcgtgtatcaagtggctgaggatggtaggctctcaggcgtgatagaggaaaccctacatagtgtagatacctctaagctggagcatgatctgagggaggtgctccagagctttaagctcagtgataagaggatcaaggaattttttgaggcgtttggagagtgccttactgagttttatgatatgagcctcaaagagaaacttgatggggcggtatctaggctctatcagggtgatgcagaaactagaggtactgagtttaagggcggcggcgtggagatcgctgatcctactacattctattgtaaggagttttggtaatgcttaaatgggtgctgataggggtactggtgctcattgttttatcgactatctttcttttggtagggcttttcttgagcgtatattacagtatcccttatgaggaatgggtaaagctggaggatgaaagagcaaaggctgagatagagcgtaaggctaaaaaagagaaacggggtaaaaatcatgatagataaactggatgcttttctggctgagctggaaaagagagggatacagattagcggtgataccgcttttctctgtagtgatggagctgtactctttgtgcagaatgagagaggcggcgtggatgtttccattgtaagaaatctggtgcctattgattactctttaggtattactgatgaggatgtggaaaactggaggaatacagaggagctctttgaggaaatgggaggtagtgaaaatggctgagattgatagcctcatagctgaggtaaataagaagtacaaaactgatattatcaggaaagcctctgatctcaagagtatggagtttatcccctactcctctcctcagatgaattaccttaccagaggcggagtacctgtagggcggatgatagagctggtgggattgcctcagagcggcaaaactactacagctcttgatattctttctaatttccagaaaaagtacactgagaggctagctgtgtatctggatgctgagaatactctggatcgtgattggggagaaactatgggggtagattgggatagggttatccttattcagcctgagagcgaatacggagaggatctcttagatatgctcttagattatatccgctctggtaagatagggctggtagtgctggatagtgccccctttatcgtgcctaagggggtagcagagaaagggctggatgagaaaagctacggcggtaacagtgctctcatgaaagccttttgtgataaggtgatccctctctgtaaaaagtttgagtgtacctttttgatgcttaatcagctcagggagaatataggtaatccgtacaagccctataagatcccttgtggtacagctcttactcatgcctgtagtgagatcctctggtttactaagggggctctgctggatgataagtacaaggaggtaagcggtaactatgctacccctataggcaatctggtaagcgtgaaaatggagaaaaacaaagttaccagaaatgataggcggttaggtacatatactcttaattatgagcggggtgtagatgagatcaaggatactctggatctggggctcactctggggattatcgtacagactggagcatggtacaagatcacagatactcagggcaaagagagaaagctacagggctactcaggggtacaggatttttactacaatgatctggatgagctggaggctctgaaagctaaggtatatgaggctacaaagtagtagagcgggagggtgtaaaagccctcccctctttttttttgtctaaaaatctcccctcagtgtgattaggttttttatcactacgggggggggggcggataaatgcctacaaaaatgagtattgaggaaatgcgtaaacatgagtgggtagttagctggagcggaggtaaagacagtacagctacaattattctttgccataaatacggaataccaataaagaaaataatctatgtgagaatgatgtgggatgaaaagctaccagctactctccctgtaatgacaaaatttgtagatcatactaaggcggtatttgagagctggggctatcctgtagagatagtgcctagtgttaaaaccgctaaaagcctaaccgaaaagatctattttagatctaaggtacatccagagaaaaacggtaagccttatggggttatggcgtttggtagagggcattgtaaatttacaggggtaaagcaagctaccattaaaaccctagtatctaaggatgagtatgagcttataggttatgcagtagatgaggatgatagaatacatagattaacagataaaaagcaatctataatgtgtaccttagaggtaacggaggcggaggcttttaagatctgtagagaggcagatttactatctcctttgtatgacatgagtatttctagggatgggtgctggttttgccctaatgcaggagttagagagagagttattctaaaggagcagtaccctgagctgatagctaagataaggagtatgatagagttgtgtgggtatgatgttagctattttgtgcctagaaataattggttacaggattatgtaaagggtactttatgataagagagaggggggctgtaaaaggttcctctctaattttttatatacccctcaaaacttttttcaaaaaccccttgacatacttatatagggggtatataataaaaaggcattaagggatacaaactgaaatcggaggttaaggttatgggaaacaagatctatatccgtactgataagaatggtactaagatttatcatgattacacctgtacacggtgcggcggggctggctactctgagaactggagatttactggaatgacttgttataagtgcggcggcactggtaaacagcttgagcctcagatcattaaggagtacactcctgagtatgaggctaagctggcggctcagagagctaagcggcaagaaaagcagaggcttgagcggattgaggagctaaagagtaggctccctgagatgctgatggataagggctttaatgctgagggtaaggtttatgccgctactggtgatacctacagtatcaaggatgagcttaaagaggctggggctcactggaaaccccgccttaatagctggatctttactgagcctcatcttgagtacaatacagtagagattagctgggaggaggttattgagcctaattatgagggcggctggctggattggaaagacattaacccctctgagttaatccagagcaagctccctaaggtagaaaagcctgtatctcagtatgttggtgaggttggcaagaggttagaggttgaggttactttagtggatgtgtttgggtttgaggttcctagctttattccgtggggcggcactgatactaagatggtgtataagtttgaggatgctagcggtaatattctggtatggtttactacagggtatgggctggatgctaatcagtatcctcagggctctagcctcaagattagaggcacagtaaaagagcactctgagtataaaggcgataagcaaacggttttacagcgggtaaaggtggcgtaagaggctggggaggggctccctcccctactctaaaaaatctggaggttataggatatgttagaaaagaagatcaggcggtataagctcatggatgctcatagagagcttgttagaaaagggctctacagacaggctcagctagtgctcaggctcttaagagagggcaaggttattctctggctggatgatgatagctgggcggtagagagcctgtgtgaggggtttggatgccgtatatggtactctggtaatggtaatagagcggtagctcatgtgtgaggaggtataggctatgtgtaagtgtaagatgtgcggagatgtttacagtgctgaggatctcagggagcttagggagatgggtgaggaatataacagaaagccttttctttgtcctgattgctttgatgagtttaacaggatggatagtgaggatcagatggagctgttgctcaatgattttaggagggctgtagagatgctgaaagagtttatatttgaggtagagggtaagaggatctctatcaaggctgagagccttgaggaggcagttaaggatctcaagggcaagcggtattatttactcactacttgccctgtgagtacccctaagaaataaaaagcccgtctgatgatgatctacagggcatagatcgaaaccgtcttttagacggtcacgggagcccgtcggcacagaggaaaaccgccgcctcttttatatatatcgttctttgaaaacttcatagggaggtaatgagcatggataaagcggtagaggcattgagagagcacttagcagagctggagtaccagtatgaaaaagccctacagagtgagggagaggctcaggtagcctacagagagggtatgatggagggcgtgagaaaagctctccagatacttgaaaattttatataagtggtatataataagggagttcgctattatgagaggtatggagataagggatagagtagctctttataagagctactggagcgattgtaaagccgtggagcctgttagaaagatcctcagggctggagtacctgtagataagttggaggctctggaggttataagagcccttgatacagagctttcagatctgtacatggtagagatccctgtaatcacctgttgggtgagggatagtaactatgtaccagaaacaagagagatctatcttactgagcctgatctcaaggattttctgcattgtttcagacatcacttgcagaacattgagcggcggtatgagcggcgtgggcttactacagagggaaatcaggatctagctctcctcccctatcaggattgtatttataagctcaggggtgaggatgatgctatagcgtggagtaaaatgctattagaggtatgcagataaaaaattttaatggaggttttaactatgaaatgccctaagtgtggatctgagaatgtaactgtacaggtggtaacggagcaggagctcaaggaaaagaaacacggtattatctggtggctctgtgtgggctggtggtggatacctattaagtggctggtatttactttacccgctatcttagtaaagctctttggctcaaagaaatacaagacagtaaatcactcaaagaaagtagcggtatgtaataactgtggtaagagctggactgtgtaacggtagctctacatagtagcggagaggtgtaaaagcccctccgctcttttttttttgtctaaaaaagcccctgtaaagtgattaggttaggtatcactgaaagagaggagaggtgctggtgtgggagaaaagcgggtaacttctacagatattaagttagccctcaaggatatgcacaataacagaaatacttattttcttactgagtgtaaaacctgtagtacctattttccagatcctcagggcttgcttatctttgatgggctggctatcacaaagagctatactaagccctgtattgtgggttatgagatcaaggtaagcaggagtgattttctgggagatgctaagtggcacttatatctacagtattgtaatgagtttttctttgtagtgcctaagggcttgatccgaaaagaggagctccctgagggggttgggctgatctactatgatcctgatgctaaaacagtacttcatacagttaaaaaggctctgtacagagcaatagatgatcctgtaggggtttataagtacattatttatagccgccttgaggaggatcgtatccctttttatgaggataaggctatttttgcaaaggattatcttgaggataaatcctataagaaagctataggagatcagttaggctctaagctggctcatgagttacaggatgctctctgtaggctggataggttatctggtaaagagcatgagctggagtgctggtatagggtacagaaagtgctagaaaaacataggctctactttagctggaggcggcactttaggaaagatgagcctgaggattggagctgggtagatgagctggataaagctcttagtggctttatcaagtctaatgatctggatgaggtagagaataagctacagtatgctctaaatgtcatacaacgaattaaggagaaagatgcaaatgattaaggctgagtataagggtatctctgataagattttggggtgtgagctcaggagcggtaaggtgtaccctatttctacttactgtgaaaaggggcagcttattgtgagggttatgaggctggagctccagtaccgtaaccttgaggagtttcttaagttttggagagtgagggcggtgtatcgtgggtagagcggaaaggcggcggctggagcgggaaaagagtaaggctcagaaaacctatactctcactcaggctcagatagatgagatgaaaaagaaagcggtagatgaggctgtaggtacagcttttatcctcatgctggctatccctatcatggtgttacatgataagtattgggtgaaaacggctaaaaagaggctacctgagtttgtagataagtgccttgatctctgggatgcttataatcagggctatgttactctggatgagttaaaggataccctatgggaggagggcggtgtaaagctggagagatcggaaacctataagggaggtaaaaagcggtgaggaatagtaccagagctaagagctcagagcaagaaaagcgaatagctaaggctatgggagggcggcaagtggtaggctcaggctctaccccattccttaagggggatgtgattgcaggaaagctctttattgaggctaagacaaagatggagcctagtaagagtatctctgtaaaaaaggagtggctggaaaaggctaaggctcaggctctcagtactagaaaagaggattatacagtagctatctcttttggagagcctaaagagtattacatagtagaggatactctgatggaggatctctataaggctagagaggctctcagagctctcatagatgctttaggtgggctggatgatcctctggtagctggttttgatggtgtaagggctgatgagattaggagcaattataggaaattgattaggagggtttacggtgaatgagtttgaaaacagcgggtttacccttactctgagggctcttagggagttagattatcatgatactatcaaggtgattagctctaggacaggtaaggtattgatccataactataacgctaataagcaggggtatttaggggatctgaatattacagggatttttactgagatcgctgtagggagagataaggattgggctaagcctgttttagtggcgtgggcttatgaggatcagtacaaagagcttaagaaaaaggctgaggaggctgtaaaaaatgcgtgagtgttgcgggaattgtgcttataacagctatcaagatggagagtttgtgtgtggtaattctgatagtgaggcttatgggtgtgctactgcctatactgataattgtgaggagtatgaggaaaaatgaatatttcagatctcaatatcaaaaacgctgagcattatgggtatgaggctcagagtaatcagcttgtagaggaatgtgcagagctgatacaggcggtaagcaagtacaggagagctagaggtacggggcaggaaactccacttaaggagcaagtggctttagataatctcattgaggagattgcagatgtagagatcatgttggagcaaataaagcacttgcttaagataccagagggggatctgcttgcttataagcagtttaaggtaaatcgtactaaagagcgtattgaggggagagggtaaaacctctccttttttctctctaacaatgcctcctaaatgtgattaggttatgtatctgagttaaggaggcggcggtaatgagtactgaggctgatattgttgattacttgaaagagtatcacaacaaagagagcaaggctatcaagggtaggagcctgtgtgagcttttcaatttgcatagtaaacaggtaagaaatctggtaagcgtactgaggcaaaatggagagcctatctgtagctctaataatgggtattggtattctaatgatcctgaggatctggatcggactatcaaaagactttcggaacaggtgaaaaatatgagccgtgctgtagatgggctctacagggctaaggaggagttaggaaatgagtagcagagctagtagagagagagctagacagaggcggcggagaattactatggctcagagattaggggctatagtactgatgctggtactgattgtggctcttgtgggtatttttagaggttgcggtaaggtagatgagcctactctacctccagcggctacagagagctctattgagcttgctagctctgaggagctgagtgctagtagtatgagttattctcctgagcctgaggaaacccctacatactatggagatcctgataactatgtttatccgttcaataccatgagtaccgattgggatggatcggtatatgataacgggtttaagctctatgagatcccttatgagtacgctagagagggcggatgctttccagaggtggtacaggtttatctctggtgcttatgtgagcaaagggatattgattattatatggtagtagccctcatagagagggagagcggctataagtgggatgctacaggagatggtggtaatagcgttggctatatgcagatcggtaaaaagtggcacaaagataggatgcttgaggagggtgtagaggatctacttaatccttatggcaatatcagagtagggctgaatttcctccagtatctcaataaaaagtatctggataatagcggtgctaactgtgtgctcatggcttacaacatgggagagagcggagctaggagcctctggaaagagggtatctacagtacagagtacagtagagaggtactcaagagggctgaggaaatcaggcaggagttaggaaactaaaggatatatgcaggaaagtaaaggatcattgtgctggatggtgatcctttactttcctatatggaggatttttcaatgtttgaggctggtgattttgttaagtggatggagcctctggatcatgagtatagctatggtaaaatcctcagaattgagcgtaacagggcttttatagaggaaattggaggctactacgctggtaaggtgtggtgtattcacttaaggtatatcagaaaatgggagagaggtaggaaaggtgagagtaagggatatagttaatgatgaattacttaggatgagttactcagagcctaagaatatcaaaagcctcctccgaaactggacagggttagaaaacatgagccttaagggagatacagtagctacctgtgttctggtggatttgaaaagagctacagggatagatcctgatcggtttaatcgtcataataggagcgtatttgatgaggggtataaagaggggtatctctcttattatcagtttatgagtatagcctatactctggtgctggggtattctcaggaggatattgcttatgtgatgggtgtggatcaatcggttatcagtaagaatatccgtacagggatcaagagaattatcaaagtattggagggtaaagccgatggggataaagtacaggcaggaggatgaggcggataagtggcttagggagcatgatccctattacacagatagcaggaaaaataagagaaagaaagtatctcatccttatgatacccctgagcaagagcataggagatctcagatagagatccctattagtaatctaaatggggctcaaaagagaaagctaaaagaggtggctggggcgtatgatgaggatggtaattttgaattatgaggggtagatacatattttctacaggtttgtaacctatctgatgaaaggaattgcactctttttacactataaatttcatggagggatgagaaaatggagtataagcatgagattaggtggggagatcctctggagcttaagccttatgagaataaccctagagtaaatgattatgcggtgaaaaaggtacttgctagtatagaggaatttggttttacctcccctatccttgtagatcctgatctggtaatcatagcagggcatacacggagagaggcggctatcctcaaagggctggagaaagtgccttatatcgtggtagactggatgagccctgagcaagtgaaagcctacaggattgcagataataagctgggtgagctgagtacatgggatgagggagctcttaaggaggagctctttgagctgaaagagcttgattttccccttgaggtaatgggctttactgagatggatctcaaggatctctttgtagaggaggagcctgaggagaaagagaaagcccctaaagaggagaaaactaccttacctatgctgaggtttggtagtaacagcgtgagaattacagaggatgagctggtactcctcagtaaccgctataatgagtatgtagagcttacacctgaggagggctttattgtatggctactaaaaagaggcttataaggcggctcaggaaaaagcaggagaaacggtttaagaaagagttaagacaatatgtagctgaggctcatggtttatctcttgatgaggtaacagtaaaagaggctgggggcggaaaatatgatgtagttattcagcctaaggtagctgtagagaggctcactatggatattgttttagtataggaattaagggagagatgtaaaatgtgtgatcgtggggtaagagagaaaactctgcttgaggaattagagagccttgatctggatcagcatgatagagatcggattgtgaaaaagtacaggtgtgaggttgagcggcgtaaagaggagagttatcaggagatgagctctttaaggcgtgagttggaggagaaagataatatcatcaaaggcttagcggggtatataggaaagatgcagtaagagggctgtaaagtggtaaaggtatttagtaaaacaagtgatgagtgtttacagtgctcttactttgatgattgtgataaaaagcggatggtaatgtgtgctgtgaaagagatacctcctcctcctatgatggagagggcggcggagagtgtgagtatgcctcttgcagaggatctcttagtaaagcatgattacagagatataaaggtaggagaaaacactactatcactattgatcttgaggatatgaaaaagcagttagaaaaggacttttacaaggctttaggttgtccttttatggagtgctgagattgggagaggtgtaaaagcctctcctctttcatttccatgaaaaaccctactgaaatcaaaaggaaaaacggggcggcggcggagagaggatttaatataacaaactaaagtaaattcttataataacctaactctatagagagaaagtaaagaaagaaagtaaaatctcttatgaaactccctataactgaaatagcaagagtaaaaccttgagagagaatgaacataagagagctttttctatttccttaatttgagtagtggtatctggaatgttagcaagtttctcaaagaaaagaaaacagagaaaggagggcggcggcgtggctagtttgaataaggagaacactctccagcgtgaggcttttgagatatattacggtatggggaaaaagcggagccttaaggcggttgcagagcgtgtaaaccgtactgagcgtactgtagctggctggagtagagcctataattgggtagatcggtgctatcagcgtgagattgaggatgctaaggctggagaggctagtaaagtggctctggctcagactacagatgttaaaacacggtacaggatcatgataaataacctgatggctaaggctactaagctgatagctgagggcaagctgggtatcaggaatgtacaggattttgagagagtagttaagctggatctcctgctgatgggtgaaagcgtggatagagctgagctggtaggggctacagagctctctcaggctgataaggataggcttgataagatagctaagctcctcagtgataagtaggctttttgtgcagattgtatatagggatagcgttgatccctatagctcaatacaggagaaaaaggcaatttgcacaaatggcggctacatatcaaaaaaaaaacggcggtaagtgattaggttaagtatcaactttataggaggtattcactatggaacacaattcagtaaaaagccctttgcactatacggaggggcgaaagtttgagcctaaggatgttatccgtgattgggggctcaatttcaatctgggatcggctcttaagtatattgccagggctgggagaaagggtaacacggtagaggatctggaaaaggctagagagtatctggcttttgagattgaggctctcaaggctgaaataggcagagagagagctggtaaagctccctatcattctaattgcagatgcactactaagtctgaggagaaagagcctgagggtgtgcgttgcggcgtgattgagctggaagtacctaaggggatgccgctggagggtattatccagatggctattaagaaaatcgtggaggtagatgagtatggatctcagagatgagatcgctctggtatcccctacggatactcccctcactaccttgctgatgggtagaggtgcggttgttcccgctaaggatattaccgttacatggcgtgagcgtaagctcaatgaggatcgtggtactctcatccttgagggtgcggaggctggtactcctatcaagtctagccgtggctctctgagcaatatttgtcagatcattgagaaagttactcaggtgagcggtacagctcaggctcttaatcctaaggggatcggtaacagctttgatgctgagattgcggatcgcttgctggaaactaagagggatctggagtggtatttcctcaacggtactaaggctgaggaggctgatagcactcctagacagatgaacggtcttatcaatctggttaattccgctaatgtcattgacggtacggcggggcttactgaggatctcttgctggatgctctccagaaaatgtgggatcacggtgctcagggtgagtatttcacctttgtaaacgcctctgtaaagcgtttgattaaccgccttgctaaggctggggataatatccgctttatcaagggtgatgagggtgtaggtaagatgttcggtgttacttataaccgctttgagagtgattttggtatcctcaatatggtgctggatcgtcatacggcggctaataccctgtttgcggtggatctggaacaggtggagattgctgagctccgtggtactttctatgaggatctgcctaaggctggtgattaccagaaagggcatatcatcaatgagagcactatcaagctcctcaatagctatgctggtgctaagatcatcaacctgagcaagctggctactgataccgctggtgcgtaagtctgagaaagagaggtaaatatcatggcaaagaatactacacagggtaaagatcctgagatcacagaaaccgctcagaatactcctgatactgaaaatcagggggctacccctaaggaggaaactcctaaggctgaaacgcctaagggcaaggtgtataagtttgtttctgataacaagtttctcacctgtagctctgtaggtgtgcagtttatcaacggaaaggcagaaacctctagccttgaggttgctaaggtgctggctactcttagcggggttactttggtggaggattgagcctcttttgtgagtaaaggaggtgcctcacttgaatagccttgagagatgcagaatactcctagggctctcagaggataacgctaaaaagctggctatcttagaggtgtgccttgataaagctagggatgatatatctgagttttgcagggataccttttatgatgagagcggggcggatgtgttccctagagctcttaggagtgtacaggaagatctagcggtaatcaaataccgtaagcgtggggcggagggagaaacatcctactctctcagtgatgagaatgtatcttttgatgatcctctacctgataatgtaaagcagaggctctacccttacaggcggctctttcctagagagtatttgccgaaagagtaagggggtgaggtgagtgctggagtttatgctagataagagggttatcgttaaacggtactcctcaaaactaggaaagtataaccgccctaataaaaagctggaggaggtaggctcttacccttgccatacctcagagagcactactactacagctcagctccagccccaaaaagaaaacactacggatcttaatttgtatgtagagcctgatgcagatattcggcttggagatattctttatatctatgagctggatgagtatgatgagatcatagagagctcagagtacaaggctaaggcggataagccgtacaaaaagcgtacagctcttaaagtacccttgatagggttgcaggaggtgtaggctatgagtgatatggggttttctattgatgggtgggcagattttgtagagaattttgcaaagtttgttgacaagtgggaggctaaaaaggctatcctgcttaagcgtatgggtaatatatacctgagtaatgtgttaccctttgtgcctgtagatacctctaggcttgtggataatatctttctgtttacagagggtatccctcaagactatgtagaggtaggcactaatgtaaaatatgcactctttgtagatgagggtcatgtacagcataggcgatttttacccgctgataagctcagtgtgggcggtagggctaagtacctcaagagtagggatcaaaaagggatcatgctcaaagagaagtatgtagagggagctcattacatggataaggggctcacggcggctaagcctagccttacacggctggtaaatagctttatggaggagtgtgctagagaggtggagggaggtaggttatgagattgcttaacagcgtttgtaaggttattgcctccgcctatactggtgtacctgtacatattgaggaagtgcctagagagtttcaaagagggtgcttttatgtatcccttactacggggagtgcagagctcaaaaatggtaatgtgtatcaggatgatcctacttttcagattgtctttttcggtaagcggaatgaggcggatcaggttattgctgaggagctgtatgaggtaaaggaaaagctcaagtaccttttcctacttcaaaaggttgtaccagtgataccgctggatggcgtaaaggaaaagcctagatatgcaaagattgagagctactctgatgagctcaggatctcagagggggctatatatgcccgtctggtactaaactttacggaggatgtacctaagcctcaatatgagtatgatctcattaaagaggtggatattgtaacacaaacaaaaatagcaaacggataaggaggtttttgcaatatgggattgcctgatattgttattgagttttctcgaaaagctgtagccgctatccagagtggtactcttggggttgtaggtatcatcctcaaggatattaaaaacaatggggctatgatcctgaggggcgtggatgagatccctacgggtgatagtgctttcaatgcggctaatacggcatatatccagagagcctttattggggctcctactaaggtgattgtttacaccttgcctcaggatgcagaggattataatgccgctttcaagtactttgctactcagcgggtacattacatggtaggagctcctgatatttctactgaggaggctaagctctttgctacatggatcaaggggctgagagctaaatctatccgccgccctgtagcggtattgcctaatacggcggaggatgatcgctctgtggttaatttctctgtagtcaactacagctctacagataagatcatggagggagaaaaggcttacacagaggcggagtactgtagccgtatcgctggcttgctggctggtgtggatctgcgtatttccgctacctttaagccgctctctgagcttactcagatccctagtgcggatgatgaggaagtggatgcggctattgatgctggtaagctggtgctctacagtgatggggagcgtattgtaatcggtagaggcgtaaactctctggttactactactgaggtgaatacggaggatcttaagaaaatcaagatctccgctattcaggatctcattgagggcgatatttacagcactatcaatagctcttatatcggtaactacagtaacagctacgataacaagtgcttgctgattaccgctattaggggctacctgagagggctggaggctactgatggaggtaagggctatctgagagctaatagctctacaatggagatcaatgtagctaagcagaaactctatcttgagagtatcggtattgatacctctgagatgagtgagcaggagatcaaggaggctaatacaggctctcatgtattcctcaaaggtacgatcagtatccttgatgctattgaggatgttgacatcttcattaacaaagagtaagggagggtataagagatggctgtagaaactaagcgtatctgtaacggtacttttggtgaggtctggcttgatggcgattatgtcggagagtgcaaaaaggctcaggcaaaggtagagtttaacaaagaggagatcaaacagtgcggtatgtttttcactgatagcaaggtggtagggtgcaagggtacaggctccctcactttgtttaaggtcaattcccgtatggctatcaggattgccgatatggtgagaaacaagcaggatctcagatttacggtggtaagtaagctggctgatcctgatgcttatggggctgagcgtgtttccattagcggcgtacagtttgatgatcttaccctgtttgattgggaggctcaaactccgggtgaggttgaaactccgtttatctttacggggtatgagtatctggatcagatcactcctcagtaaagagtactatcatttaactggtagggcgtgagaggggtgtaatatctctctcacgccttatttttattttattcagaaaatggagggctataaaatgtctaagaatgtaactaatcctattgagaatgatgagatccttgagggcatggaacaggatcagaaagaggctgtaaatgttctggatctcttgctgggatcggatattggggagattaagctccctactaagacagtagaaattacccgccttactgaggttttcggtaagccgtttatcctcacttgtcaggctctttcccctgagaagtatgaggaggtacaggatatggcggtatccgtcaagggtaaggatgtggatctggatgtttctcagctccagctctttactgtgatggagggcgtgattggagaggatggcaagccgctctttaaaagtgctgagctccgctctaagttcaaagtgcctacgcctaaggatgtagtgagaaagatcctcctgagcggtgagattaccgccgtttatacagagatcgctaagctctctggctttggtgatggggcggttaaagaagtaaaaaactaatagaaacagatgggcttactcagatgatgtatttttactggaaacatcggggtatccgtccatctgttttctattccatgcctagaggtgagctcacggtaatacaggctttttatgaatatgaggttaaagagcgtaatgagctcatggagagtgcaaagggtaaggctgtgtgtcctttgtggttaatgtaagaggtaaaggaggtgctgtattatgattgagtttggtgcaaaactgagcttaaaagataatatgtcagctaccctccagaaaaaccttgaaatacagcggcgatttactcagcaaatttctcagactaatgagagcgtgagggttctggggagaacaagggtaaatacctctatcaatgctactgataatgcctctggggtgttagatgtggtgagagaggggctggatgctactagcggtatggtggcaagccctgagctttcccctgttgacggagcaagccctattctggaaagagtaagggcggagcttgaggagatgagctctcaggtatcaagccctgagctctctcctactgataatgcctctggggtaataaacactgtaagggatggcttagagagtatttctgatacagtggctactcctgagatctcccctgtagatgaggctacagaggttatagggcgtgtgagagctggcttagatagtctgagtactcaaggggctactcctgaggtaaaccttgaggatgaggctagtacgcctctggagaggctaaaacagcggctcttaaatgctggctctatcaggattgctcctagagctgagatagacgatcaagctacagctcaggctaataagatagcagataagatcagagagatagggcggtttgtggctagccctgtaatcaagctcaaggatctgatctcctctgaggctggtaaaatcagccgtaaacttagggagattgctactacttatactcctattgtgaggctcagagatgccgcctcagtgggcttagcaaagatcaagaataccttaggctggttaggtcgtgcggctgtgtaccctgtattgagccttaaggatatggctactacagggataaacaaggtaagggtagctctgaaaacggtgggtaagctggtagcaaaacccgctatagctatcaaggatgccgctacaaacggtatcaacaaggtaaaaaatgcccttaagacggtaggaaaaacggttgctaagccgtttatccagcttaaggacaaagcaagccccattgtgagaaagctacaggatggcttaaaggctgtgggtaaaacggttgctaagccgttcatagctataaaggatggggcaagcaaggtaatcagtaaagttaaggatgggctcaagggaataggctctacagtggctaaggctacagtggctatcaaggatgccgctagtgctgggctggataagatcaagagcctgttaagcactctggctaagggcgttaccattggtgtaagtattgctggggctggagcggttgcctctcttatggagggtgcaaaacttgagcaaagtatgggcggcgttgaaaccctgtttaagggggatgccgctactgtaaaggctaatgcggatgccgcttttaagacggctggactttccgctaatgcctacatggaaaccgttacagggttttcagcctccctcttacagtctttgggcggcgataccttaaaatccgctaagatcgctgatatggcggttattgatatggcggataatgctaataagtttggtactgatatagctagtatccaaaacgcctatcagggttttgcaaaacaaaactatgatatgcttgataacctcaaactggggtatggcggtactaaggaggagatggagcggctcttagtagaggctggtaagctctcaggtcagcagtatgatattagtagccttgcagatgtgtatagtgctattcatgttgtacaagagaatttgggagtagctggtactactgcgaaagaggcaagcgaaacttttagcggatcttttgcggctatgaaagcctccgctcaaaaccttttaggtaatctggctataggcggggatgttacaagctctatggagcagttggtagatagtgcggctacctttgtagctggtaacttgataccgatgttagtaaacattttcacggcgttaccagatgctatcaaggtgggggtaagtaatgcggctcctaggatcaagagtgctttgcaagaggcattacctccctctgtgtttgattttgcctctaatatctttgctggctttaagaacatagtagatacctttgctcctgtagttgaacagctagggagtatgttctctgaggtagcccctaagatagcggaaaccttaggaggagcctttggggatggaggaggcatagtacagaaatttgcagatgctatctctatggcaattcctactataggaaatctgctagagggtatggctagtgtggtagcggttatcatgcctgtactggagagtttgggagatgctttcttacaggtatttcctagtattctgggggttataaatgccgttatccctgctttgttgcctgttttacagagtttgggtacagttatccagactttgatccctgtggtaactcagatcattcagacttttgcaggggtggtacaacaggttttccccattgtatctcagattattacaatggtggttaatgcggtaatgcctgtaatacaggcgtttgctggtatcattcagcaagccttaccgctgatacaaaatataatcacggtggtagcgggggctattcaagcggtaatgcctacaatttctcagatcttcactgaggtaggtgctaaggtagctgaggttatcaatactgtgattgtgcctgtaatcaatgtgctctctcagattttccagacggtcagccccattatacagagtgcggtagagattgtggctcaggtctttagtgcggcttgggatgttgtttcccctatactggatctggctatgactatctttaatgccctctggagcgtggtggaggcggttttccctgctattcagagcactattgagagtgtgtggaacgccttgagccctgtatttgatgctctttccagtgcgttaagctggctgggagatgctctgagtacagtgggcggctggattggcggagcgattgatacagtaggcggctggttaggctttgcctatggtaaagatcgtgtaccgtacaataactatccagcggtactacatgagggtgaaaaggtacttaccagaaatcaggcggatcaatatgatagggtgatgagtaccagagggatagagcttgatcctactatcaagcctgtaactagcggcactacagctcctcagcctatcagtaatgtacaggaagttacagaggtaaaacaggagaataaaggatctaatatcactattgaaaaactggcggataccgttgttattgagaaagaggcggatgtggataaggtggtacaggatatggttactaagttccgtaaacttgtacctaatatgccttaaaggaggtgcggaaaatgtcttttactctacaaaagggcggagataggctggtattgcctgtaaacccctcagattatacagtttccgtatctcacaggaatacggtaactaatgtaattcaaataggtgatgtaaacctcatgggaaagacagggctaagggaggtatctcttagctctttctttcctgctaaaaactataactttgctagctatgctggagatccgctctctatcgtggaaaagattgagcggtggaggaaatctggagagccttgcagagttgtaataggcagaaatctcaatatggagtgtaccattgagagctttaattggggtgaaaaggatgctacaggagatatttatttcacaatggctctaaaggaatacaagaggatcaaaacgaaaaaggcaaatatcacagtagaaaccgatccgcctaaacagcgggaaactaaagcccctgagaataaaggcagtactcctagacagtacacggtaaaaagcggtgattgcctttggaatattgctaagcagtattacggtaatggagctcagtataaaaagctggtggatgctaatcagcaaattttttctaagcggagccctaacctgatttatgctggtgatgttcttactattccttaatgggaggtgtaagggtgaaagtactacacaaagatacagatataacggagtatatcagtgctatgagctggggcggctctaagtctgaaatggctagaaagctggagctcaagatagtaaatgctcctctggatcagaatgttaaaaagctcaatatagcccttgcagatcctatctacctgtttgccgatgatggaaaaacagagcttttcagagggtttatcacagaaagggaggctagtagtgttactggtgttgttacctatgtagcctatgatattctcttttataccctcaagagtaaagctacctacaatttcagcggtaaaacggctgaggcaattactcaaatggtgtgtaatgatctggagatccctgtaggctctttggctagtacagggatctctcagaaactcattgtacagcaaaaaacgatctatgagattatctcagaggcgtataagcaagctactcagcaaaatggtaagagctatattatccgtgctgtaaagggtaagctctgtgtggagctggtgggaggcttagtgtgtgagattgagctagccgatgatggtaatatcatctccagcaaatacaaggaaacccttaacagcatggtaaacagggtgaggatctatgatggagagggaaaccctcagggaatggtacaaaatgatgcagatctgaaatatggtgtgtttcaagaggtctacacgaaagaggagggcaaggatgctactactacggctaagagtatgtttaagggtgtagagaaaacctttactcttgagtgtattgacttcacaggggctattactggagctggggctattgtaaaagataactctacaggcttgagcggtgaggtgtggatagatgctgatactcatacctatcagaatggggtaggcactatgagccttactgttactctgaaaaatcctcctgtacctgaggaaaagaaagaggagaaagtagagagcaaagagtacaaggttggagatgtggtacagtttaacggtggtaatcactatgtatcctctacggctactaagtcaggcggctctccctccgctggtccagctaaaatcactatcattaacaagggctcagctcatccttatcacttagttactgaggattggggtaaaactcatgtttggggctgggttgatgagggctcttttagttaggaggtgcgtgtatggctgatggcggagaaatgaaaaatgatgccttttatgctgagatgatcgagatgatgagggctcaaggtagaaaagataaccctgttaccctccagttaggggtaatgcagagctctaacagcgtgaaaattgatgatctggtactaaaggctgaggatttgtatatagcggattatctgatagctggttataccagacagattaagatcccatatgtatctggagttactgtagatactacacaaaataatccttttggtagtgttgatgctcaaggtcagtaccatgatcctgatacaagggtgagcactcaggctaagattacttacattgatgggcttaaaaagggtgatctggtagccgtacagaaacttaatgatactaacaagtttgtaattttggcaagggtaaaggaggcgtgatattatgagcttgtttccctttgtaacggatgaggagatagctcaggttactccagaggtaacagcctcctctattcgtgagtatgagctggattttaagacagggcggcttactggtaggattgtagagggtgtagatgctctttgtgtgtgggcttatttagctctcaaggctaagcggtacagatgggttatttatagctggcaatacggagaggagtacactaacctcataggctatagctttgatgaggattatctgtattctgaggtaaagcgatatattgaggagtgcttatttgtcaatgagcacattacaggtatagaggatcttacagtaaatcaggttaatgaaatgctgtatatccgttttcggatgattacagatgtgggtagtaaggaggtgagtatggatgtatgaggatcagacttatgagaaaatccttgagagatcccttgctagagtgggggcggatgtggataagcgtgagggctccctgattatgaacgctatagcccctgtatctgctgaacacgctaatatctacattttgcttgatgggattatctctgatggttatgcagataccgctagcagagagtacctcattaggaggtgtgctgagagaggtattacccctcatcctgctactcaggcggtgcttaagggtaagtttaatagggagatccccattggatcacgctttaatctggatgagctcaattataaagctattgagtttgttgagagcaagagtgagggtgaggctctgtattactactatcaaatgcagtgtgaaacggtgggtacagagggtaataagcactttggagagctttctagcattgaatttatttctaatgatctggagggctctttgattgagcttttaatccccgctgaggatgatgaggatactgagatcctccgtaaaaagtactttgcctctttcagttctaatccgtttggaggcaataagcaggattacaaggataaaactaattcccttgacggtgtagggggtacagtggttatccctgtatgggatggaggaggtacagttaagctcattatcattgatagtgagtttagtaagcctactcctgagctgattgcctttgtgcaggaggctatagatccagatcctagaggtacgggtacagggatagcccctatagggcatattgtaacggtggtaggagctactgagaaagtaatcaatgtttcttgtaccgttattctgcttgagggctacactcttatccctatcaaggcaaagatacaggaggctattgagggatacctactggaaatgcgtaaggcgtgggaaaacggtagcttgattgtgcgtatctctcagatcgaaaacaggatcttaagtattgagggggtgcttgatgtgctgaataccaaaataaacggaagtacagaaaatctacccctcaatgttgaggagatacctgttatagggaaagtggaggtaagctgatggcgaaagaggtacacctgttaaattactggatgcctctactccgtaagctgaaagagtttaaggagatcgctaagactgaggagcctgagctcagatatatcttagccgctatagatcgtactcttgcaaatttctttatagagagtgctgatgagtacggtataaagcggtttgaggatatgatggggattgtacctgaggaaacggatacccttgatacaaggcgttttagggtacttacaaagtggaataactatgtaccctatactgagcctgagctctataggcggctggtaagtatttgcggctctgaggatgcctttgatttagaggagcgttataaagagtattggctgagggttactactcatttaggggtagctggagcctttgatatggtggctaatactcttgatgatatgctcccctgtaatctggtgctggagcttgcaaatatcatggaggcaaaaccttttagtaccctctatatgggcggtgtgtgctgtaccgctctggggtattgtattactcatgatattgaggctgaggctgagatagccgctcctatgcgggttggcgtggggctggctagagctggtactcatattgttactcatgatctggagagcgtggtagctactgtatctcctctatctgaggcggtagcaaatgctacagctatgctcagcatggttacacatgatgtagccttgcaggataagagtgaggcggctctgagcgtgggtacgggtactggatcggctaatgtgcggatcattactcatgatataaacagcaaagtatcaaacactggtaatacctctgtagctggctctgtgagcggtgctatgagggttacaataaattaaatgtgaaaggatggttacaagtatgggtgcttttagaagtgcggtaatcacaaagaaagggcaagccttacttgctaaggtagtggcaggatctactaagctggtctttactaagatcgctgtgagtgatactacgcttagcggcgatattgcaagtaagacagggatcggtactatcagacagcaaacggcggtagcaagcgtggtaaggcagaatgatagtaatgtaaaggtaagtgctagtttctctaactcagctcttaccgctggctattatgtgcgtactatcggcttgtatgctacagatcctcaggagggagaaatctgctacagtatctcttgtgctgatgagagtgaggctacagcggattggatgccgccctttaatgggatcggcgtgagttctttgctggtggatctggtaacggcggtatctaatgcctctaatgttactgtagaggttgatcctgcggctggggctacggtggctcagatcgttgatttgcaggggcagattgatgatgtaaggagctttgtggggtatgaggaggataatgtttatggagtggaggtagactttgcaagcaaaaagtttactaggatcgctggtagcagtaactttacctctggggctgattttgatgcccttactccgtggggcggtagaaaaagatgtatcctcactgatagcggtgtggttttggcttaccgtggagatgctggttatacggaaactggagcccttactcaggctatcactgtgggggatactgagtatgccattggtactaaggtacaggtaatggtagaacagcccattttctacattaaggcggtgcctgttaaggctgaaaacgcctccagcggtaggggtaagcagtacactaaggcaagatactatatctcccctactcctaaaactggctttacagctcctagagcctttatggatgagcatggtatctatcaggataagatttacctctctgcttttgagggatctatctatgataccagtgctacagcctatcttaaggcggatgaacaggtagcggattttgctactgatatgctttgcagtattgcaggagctaagcccgctagcggtcttactcaaaacctcactagagctaatgtgcgtaagctctgcaataacagaggtacaggctggcagagccatagtatttacgctatggcggttactgagtggttgctcatgattgagtatgctactctggatgctcagagagcggtagggcgtggagtttgtgattttacagatgatggctctactaatatggcggttgtcacgggtgctacctctggcttaggtaatggatctggcattgatcctaacggcggtgtaaatggtaagtgctctgtttcctacagaggtgaggaaaatctctggggtaatatctggacttggcttgatctcattaacattctggctaagggtgtaaatgaggtatggctccataaggcaggggctacggttgcagatgatactactgagggttatgagtgctttggagctaacttcactcatggtaacggctatcaggatcgctttggcattgatcctaatttccctgatatgctcattcctactagatgctctggtagtgatgtatttactggtaactatgcttatcagaattacacctataacgggttctttattgctgaattgggcggtgtatggcattatgcctctatatgcggcttttgtctgtatggtcgtgatgcctcctctaatcgttatcgggatgtcggcggtcgcttgctgtatgtgcctcagtctttggtggcgtgaaatcagtttaatacagggaagtaaaggagagctgtaaaaggctatcctttgctatacctttgtgttaaagggtaactgtaaaaggttcttaattactaaattaggcggtaaatggaataatgcctctaaatgcggcttttatctgaatggtaataatacctcctctaatcgtaatcggaatatcagcagtcacttactatatgtgcagtttctttattttctataagtgagatacagttaccttgcctcttggcagaacataaaaagccctttggtatcaaggggctggtaaaaaagctataaggaggtgcctatgtgcgggaaactccgtaaactgtttgatctgatacttggaagtaagcacggagaaaagcggtgctatcctttgggtagctggctcctccttttgcacatacaaaagggatgtgagcactatggagggtacaaaatacctgtttgctaagatttactcaaaggataacctccgtaaggcgtacaaaaacgctaaaaagggtaagggatggtacacagaggtcaaagaagtagagaaaaacttagattattatcttgatgagctcagagaaagcctaataaatcatacctacaaaacctctccctatgaggttttcactaaggtagagggaaataaggagcgggagatttataaactccccttttatcctgatcgagtttgtcagtgggctatcctacaggtgatagagccttttcttttgaaaacctttactaaagatacttacagtgccataccgaaaagaggggctatgcctatcattaaggctctgagagggtatgagaaaaaggttaagaaaaaatggtaaggtagttttcaagaaatggatacctagtatcttagtttctgatcctgagggtacagcatattgcttaaagctggatataagaaagtactatcctacgattgtacatgatgtgctaaaggcaaaatttagagagcttttcaaggatgaggagcttatctggatactggatgagatcattgatagtattagtacttgtcctgctactgaggaaaacattgagatcctacagcggttaggcgtttgtgtaaatatcatcatagacgatcacggcagagagtttattgagggcgtgggtatccccattggtaactatgtatctcagtatgatggtaactttaatctctcagaggtagatcactggatcaaagaggttaagggtgttaagtactattttaggtacatggatgatatggtgatttttggttccagtaaagaggagctccatagcctcaagagggatctggatgagtttattgcagatcacttaaaacaggtggttaagcataactggcaagtattcccctcaaaggtgagaggtattgattttgtgggctatcggttttttggtgagtacactctcctcaggaaatcgacttgtaaaacgctcaagagaaagatgctagcttgctctgctaaaagggctcagggtatcagccctacttatagtgaatggtgctcatttaacagttacaaagggtggctcaaatggtgtgatagctataggctatttcagaagtatgtagcccctaatgtagaatatatgcacaattattatcttaaggaggtaaaaggtaatgcaaaaatatgtaaaggtcaggagtaccgctcctgaggtgttaccgctggaaattgatgagtaccatgttactctcaataacggtatcacggagatccatgaggctccctctgaggagggtatggatggcggctttgacggctgggagattgctgaacagatcatctatgataaggatgagtatatcaaggtgattactgaaaagagtagctcccttgatgagcaagtaaccgccgctcagatggctcttgtagagctgtatgagatgatgatttaacataggaggtaagagaaatggctagagtatatgcagatcttatccgcaaaggtcttaagactattgaggatgtaccagaaaagctcaaaaaagaggttgaggaaattctggaaagaggtaatgagtgatgctccgcactctcatcctaaaaatattttttagaaaggagatacctacaatggcggttatttatgccacccttattgttaagggcaaaaagactatcaatgatgtgccagcggtcattaaggaacaggttaagcagatccttgtggatctggaagttcctgagctggcagagtaaccctgagggagagcataagctctcccttttacatttcagaaaggagggcttgtggtgtgacggaggatcagaagttagagattgagcacagactaacggcggttgagaatagatccaaaagcaatactaagcggattgatgagcatgatgaggcactaaaggaaaataccgatctgattagtgctatcaaagagcttgcggtagaaactaagtatatgagagcggatctaaatgaagtcatagaaagacttaacaagctggaaaataaagacggagcaaagtgggataaattcaagtggcttttggtagcagggcttgtaaccattattttaggctatatcgctatccagcttgggctcaagtaagttaggagtgtgatagcatgggaaaggataaaacccagaggaggggatctccgttatctctaagctctgctaggcgtaaggtggagtttagtaaaatgctggtggtattaacaggggctctttttgtcttatctcttttcttagtaagaggagatgtgcaagagggctatgatatatccagctacgccactcaaattattgtaactacaggaggtatctttggtgcctccattgttttctatctcaataaagctaaaatagaaaatctctctaaggcgaaaatccgttttgtattactcaggctgagactggagataaaactcaaggatcagctatcagaggaggcttataccctcattcttgaggaaataaaccagattgataggatgatggatagtaagctaaatggtgctttagaggaggctatacagcaagagatagagctcaggaattactaggaggtgtgaggttatgactatttcccttttcttaacgctaattgtaactttggctacagcggtatccttgcttacagaggcggtaaagaaatcttttgagggtacaaagatcaagtactcctctaatgtagttgtacttattgtatctgtgattgtgggtattggaggtacagctcttacctatatgtttttgggtattccttttactacccttaacattatttgcatggtgcttatggcggtagctgtgtggattggatctatgctggggtatgataaggtactgcaaatgattgaacagattaaaaccattaaaaagtaactgggagcctgtaataggctcctttttagtgaggaggattgctatgaataaaaaggattttgccgctattttggcagagattgagccgaaagcgggagaggaaattacagaggaaactcttgaggaattatctaacggtaaggaggacaacgaaaatgagtaatagccctttagtgagttatacaaaaatctcacctaataagacgagccctagaaatcatgccattgataccattactatccattgtgtagtaggtcagtgctcagtagaaacgcttggtaatatctttgctcctacatccagacaggcaagctctaattacggtgtaggtcttgatggcaggatcggaatgtatgtagaggaaaaggatcgctcttggtgtacttccagttctgaaaatgacaatagagcgattactattgaggtggcaagtgatacctctgagccttatgcagttaattctaaggcttataatgctttgctggatctggtaacagatatttgtaagagaaatgggattaaaaagctggtatggtctactaataaaaacaatcgtgtaaagcacttaaacggctgtaacatgactgtacatagggattatgctaacaagtcttgtcccggcaaatatctttatgacagacacggagagatcgcagatgaggtaaataagcggctgggatctggtgcaactacagagcctactaatcctaccactagcctcaagtttaaggttggggatattgtgcagtttgcaggaggtaagcattataccagtgcaagcggctcaagcggtagctctgtaaaggctggcaaggctaagatcactcatgtagctagtggtaagcatccttatcattgtagagctgtaaatgatgctggagcttttgtgagtggcgtgtatggctgggtagatgaaaataccttaacgcctattgcaagcggctctacaggtgctacagggcttaaggtgggggatcaagtaatgtttacagggtgcctccactatacaagctcttataagggtgctacagctcgtgcttgtaaggctggattggctaaggttactcagattgcctctaaaaatcctcatccgtatcacttacaggcggtggctggtaagggctctacagtgtatggctgggtaaatgaagcggatgttaccgctaatacctcctctactcctgcaaagaaatctattgacgagattgctagagaggttattagaggagattggggtaacggtcaggataggaaaaaccgccttaccgccgctggctataattactctgaggtacagaaaagagtaaatcagatgttaaagtaaggctctcctttttctttgaggggtacaggctactcattttgaggggcttgtacccctttttttgtttttctgttgctatttttatatagctggtgtataatagatacagactgaaaataaagccacttagagagcctcaagagttaggggtaggcagttatacccctgagcgattaaaacggctctgagaggctctcaggggctcaggataggattttataaaggagtgtacaggatggcttacaggagagcacaggatactaaaggattaagggcggttttctatgctagggtatctacggcggaggaggaacagcttaacgctatagagctccagattgaggaaaatagaaacacaattactaagcatggctggaaaaaggtagatgagtatatagatcggagcaagtctggtactatggttaaggggcgggatgagtaccagaggctctatgaggatctcttaggggatgcttttgatgtggtagttatcaaggatcaagagcggctcatgagaaatactctggactggtatttatttattaacaggctggtacagacaggcaagatcctctatatgtaccttgaggataaattttatagccctgatgatgcactgattacaggcattaaggctatcatagcggaggagtttagcagaaacctctctaaaaagctccataattatcatgatggacggattgaaaaggctaggcagggcttagagatagatctacagggtagcggtaatgtttttggctgggataaggtagatggtaagtatgtgataaaccctgagcaagctaaggtaaggcggctcatgtgtgagggtatcatggctaggaaaggctctactcagattgctaaggagctcaatgatgcagggtacagaaacacagtaggtaagccgtggaaacctatggatattcctaagtttgtgtatgattgcaaaaatgtaggcactatgataattaacagggagcggcatgattttgagagtaagcaaacggtaaagctccctgagagtgagtgggtatatgtaaaaggggctctccctcctattgttactgaggaggagtgggctctgatagagaaaatccatgaggagcgggtagtagctacaggctgtaacaggcggggtaagaaaacaagcggctactctttcagcggtaagctggtgtgtggggtgtgcggagccccttactggaggaaaacaaaaacctcaaaagaggagtattgggtatgtagcactaaacagcaaaaaggcagaaaaacaagggctagagatgctataggtggtaaggctggagaggtaaaccttgagggctgtgataatgagaatatctcttacaatgccctcatggagattatggctatcgtttctgagcgtttacaggcggatacaggctttataagagagtttatgctaggtaggctggatacctatgagaaacgcattacagaggctaacagaggggctacagaggcagatctacaaagagagataagccgtaaggataagctcttagatgcctatttagataatctcctcactaaagaggagtaccagaggaaagctctagctctggatgagcacattttagagctcaagagagaggtagaggctaacaaggctaaccttgaggatctggctgagatccagagagtgagagagaatattgatgcagaggtagctcagtaccttgatgaaaatgcacagcttaaggtagagtttgtgctggagcacttatctcaggtgattatctaccctgataaggtgctggttatatttgatgtatttggtgagggggtaatggtggagaaatctcagtatgtatctagggagaaacggcgcgggcaaaacgactacgctaaaagcctgctgcggcttattaaagccggacggcggcaccattacggtgaacggcatcgacattcaaaaagaccccatcgcctgcaaaaagatcatggcctacatacccgataatcctgatctttatgaattcctgacgggctacgagtatttgaattttgttgcggatatgtacggcgtatcggaagcggaccgcaaggcgcgcatggaagcgcttgccgagcggctggatattaaaaacgcgctgccgaacctcatctcggagtgctcgcacggcatgaagcagaaaatcgccgttatcggcgcgcttatccacgagccgaagctcattttgatggacgagccgttcgtcgggctcgaccccattgcggcgcacgaattaaaggagattatggcggagcattgccgaaacggcggcgctatcttcttttccacacacgttttggaggtggcggagaagctgtgcgacaatgtggccattattaaaaacggcaagctcattgcacacggcaccatggacagcgtgcgcggcgacggttctttggagcaggtcttcttagagctggaagaccacaaggactgaaagggggaggctgcatgttaagatccctctggaagctgcaatggaagcagtttgcggcgcgcatgaaaaaaggcaacggcaaaaagacctccggcggatggctggtttttctgatgctgttctttgtggtgtgcatggaaattttgatgtttgtggtgttcgcagagcttgttccgttgtgcgaaatggggcttacgtggctgtatttcgccatggcgggcacaatggcgctggcgttttccatgttgggcagcgtttttatgacgcaggcacagttgtatgacgcgaaagacaacgaacggttgctttccatgccgataccgccaaagtacattctcttgacgcgcattgcaatgctgttcacaacgacggcaggatacacgctggcggttttgctgcccgcgttcggtatttacgcgttttcctacggtgcatcggcgacgatgattatcgggtggctgtttacgtttgtggctctgagcctgatttcgcagtctgtctgctgtgcgctcggctgggtgctgcacaagctcctcagccgtctgcgcaacaaggcggttgtttcgcttttgtacatggtcatcttcatggcggtgtactggtatttttacgcgaacgtcaactcgtttctgtccgggctcgtcatgcagggcacgcagatcgcgggtgcgatgaaatatgtttggccgctttatgctattggcatggcgtgcggcggaagtcttttgcacacgctgctcgtgactttattgagcgcggcaatagcgcttttcacgctttggcggctttccgcatctttcatttcctccgtgcgtacatcgggcgcgaaagcgggtgcaaagcacaaatcgggcaaagcttccgcaaagcagcgcacgccggtgctgtctgttacgcataaggagcagcggaagttcttcacaagccccgcgtacctgatgaatttcggcttcggcttggtggtcattccggttttgccgattgccgccgcgattttccgtgggaagttgatgcagatgataagcctgatggggtttcggcccgagtggattgcgctcggcatttttggcgtgatggcgttttgtatcgcgacgtcctgcgcgaccgcgccgtctatctcgttggagggcaaaaatctgtgggtgctgcgcacgatgcccataagcggcaaaacggtgcttttgggcaagctccttatggtgtgccgcctgcaaatgccgcttgtcgccgtcagtgttttggcgctttgcctcatcgccgggtgcggtatcgggctcacggtgctgaccgtttgcgtttgcgttttgttctgctggttcgtcggcacgctcggccttgtgatgaacctgctcgcgccgcgctttgactggcagagcgaaaatcagccgtgcaagcagtctctcagcgtatgcgtcacaatgttcggcgcgtacttctttgcggcggtgatcgtcggcgtatttttcgcggtatctgcactgcatattccgggcattgcagcgtatgcggtaacgactgcgttccttttgcttgcgtctgtcttgatgcacctgcttttggtgcgttggggcgcgaaaaaatttgagcgcttagaagcctaaatcaaaataaaatcgagcgtctgcatacgtcttttggcggtgcagacgctttttcttgctttttttgcaaaatcatgctatgctgaaaccacttgatttggttggaggggcttttatgatctacacgatcacatttaatccggcggtggattacgtcgtcacggcggacacgttccgcacgggcaaaacgaatcgcacgaaaacggaaaatattgtgtttggcggcaagggcgtgaacgtctctttgctgctgcacgcgttgaatacaaaaagcatcgcgcttgggtttattgcgggctttacgggcaaagcgctgcgcgagggcgttgaaaaagaaggcatcacgaccgatttcatcgaagtcgaaaacggctttacacgcatcaatttaaagctgcatgccgaggaagaaacggaactgaacggcagcggtccggagatttcagaaaacgagctcaaaagtttttttgaaaagctcggtgccttgaccccgcaggataccttggtgctttccggcagtgtgccgaagtcactgccaaaagacatttacgcacagattgcaaagcttgcgcaaacaaaaggcgtacggctcattgtggatgccgcaggcgatttattgttgtctacgcttgaatttcagccattcctcgtaaagccgaaccgcgaggagctttccgagatgttccgtgccccggcggacacagaggaacaggtgacggcgcttgcggaggagctgaaaaaacgcggcgcaaaaaacgtgctcgtttccatggcgggcgacggtgcgcttttgtatacggaaacgggcgaggtgtattttgccccggcggcaaagggcacgctgataaactccaccggcgcgggcgattccatggtcggcggctttttggcggaattcacgcgttccggcgattttgcaaaggcgctcgccatgggcacggcggcgggcggcgcaacggcgttttccgtcggcatcgcgggctttcagaaaattatggcggtgcatgaaagtatgaaagctggggtgcagcgtgttcgatagttttctggtcgcgctgaatgcgatcatgccgacgtttttgcttttggcgttcggctactttttaaagcacaaaaacttcgtctcgtcggaatttttaaagcagacgaatacgctgacattcaaatttttcctgccgtttctgctgtttaataacatctataaaacggagatcaccgaggccatcgacggcatgacgttcacaatcgcggtagggagtctgctgttattgtttgcggtgctgtgcattgtcgtgccgcgtgtcgtgcgcgagccgaaacagcgcggcgtcatcattcagggacttttccgcagcaactacgtcatattcggcgtgagcctcgtcacgaacgtgtttggcgcggaggaggctgccgcggcatccatcttgagcgccgtactcgtgccgatgtacaatgttttggccgtcattgcgctgacggtatttacgggcagaggtaaggtctcgctgaaaaagacgctcaaatccatcgcgacaaacccgctcattatcgcggcactgctcggtgtgtttgcgtccatcattaaattgcgtttcccggcatttctggaaacgagcctgcgcgatgtttcgcgccttgccacaccgcttgcactcatcgtgctcggcggcgatttcagcttccgcaagctaaaaggcaacatgcgtattgcgggcgtgacggtgtttataaagctcgtcgtcattccgcttgtttttctgccgattgcggttctggcgggcagcagagggccgagtcttctggcgcttgcacttgcgtgggaaacgccggtcgcggtatcaagctacatcatggcgcagcaggcgggtgcagatggcgagcttgccggtcagcttgttgttttgagcgctgtgtgctgcatcccgactgtatttttgatgatctttattttgcagagcatggcgttgctgtaaaagtaaaaacccgtttccgataaaagcttcggaaacgggttttgcgctgtttaagttcattaaagatgctcgttcatttcgcggacatgcgcgcggatcttttcaaagctctcctggctgatgacgtgctcaatgcggcaggcgtcctctgttgcaatgtccttcggcacgccgagataggtgagccaatcggaaagcaacttgtggcgctcatacatgcgattggcgatggcaaggccgtcctccgtcaggtgaatgtagccgtcgccgtctacggtgatcaaattgttctcgcgcagctttttcatggctacgctgacactgggttttgtaaaattgagctcgttggcaatatcaatagaacgcacataggtgctgcgctcggataagatcaaaatggtctcaagatagttttctgcagattcctgaattttcacggctgtctcctctcacaatcggggtggataaattcttataacagtataacacaaatccaaaaagagttcaattcccattttgtgcaaaaccgaaaataagttgcaggagaaaatgacagaaaaagtcaagacccgccggggggaaccggcaggtctcggcttttcttatttcaggagcgtagtacgcgtcgtactcaatttaaatgggaagatttattattccacatcctgcagggcgtcgtagccttcttcgcctgtacggactttgataacattctccacgtcgtaaacgaagattttgccgtcaccgatgtgaccggtgtaaagcgctttcttcgccgtttcgatgaccgtgcggacaggcaccttagagatgacgacctccacctgtaccttaggcagtaggtttgcttctacgagcgtgccgcggtaatattccggcttgcccttctgaatgccgcagccgagtacgttcgtcaccgtcataccggtgatgccgacgctcatcagtgcattcttcaaggtatcgaaagctgcctgcttgcacacaatctcgaccttcgtcatcttcacgccggtgctttccgctttttcggtctttacgggggcgtgatgcacaacgaccggcactgcttcgtctaccgcagccgggccgaacggggcaggggcaacgctgaggtctgcgctttcgagcgaggtgttgatggccggaacgaagtctgcatacgcatttgcaaggccatgctcgggcaggtcaagacccataatttcttcttctctcgtcacacgcaggccgaccgtcgcgcggatgagcaggaacacaatggtaatcgtcacggctgtccaggcgcagaccgtaagcacaccaagcaattgttttgcaagcagtgcaatgccgccgccgtagaacaggccggtgaagctatcgttgccgggggctgtggtcgttgcaaaaagaccgactgcaatggtgccccaaatgccgttgcagaagtggacggcaaccgcgccgaccggatcatcgacatggagcttatagtcgagcagccaaacgccgaacgggcaaaggagaccggccacaatgccgatgattgccgcaccgaggcagtccgttacatcacagccggcggtgatggcgaccagaccggcgagagaagcgttgagacacatggaaacatccggcttgccgtactttacccatgtgaagatcatgcaggtgacggttgctatggcaggtgagacggtggtggtgaggaagatggagccgagctgctcaacgcttgttgccgcagcaccgttgaagccgtaccagccgaaccaaagaatgaacacgccaaggcagccgagcggaatgttgtggcccggaaaagcattgacctttacgatcttgccgcttgcatccttttcgaacttgccgatgcgcgggccgagcagctttgcgccgatgagtgcggaaagaccgcctaccatgtggatggcgcaggagcctgcaaaatcatggaagccgagctgcgaaagccagccaccgccccagatccagtgtgcttcgatggggtataccaaagcggagataacaccggagtaaatgcagtaggaaaggaactttgtgcgttctgccattgcgccggaaacgatggtcgcggtcgtggcgcagaacacaaggttgaatacgaaattcgaccagtcaaagtttgcgtagtttgtgaaaatatcaaagcccggcttaccgatgaagcccagtaagtcttcgcccagcaaaaagctgaagccgatgagaatgaatacgccggtgccgatgcagaagtccatcaggttcttcatcagaatgttgccggcattttttgcacgggtgaaacccgtttctaccatggcgaagccggcctgcatccagaagaccagcgccgcgcccatcaaaaaccagacgctgaagatttcgcttgtcatatgttcgtcctcctatgtgttgtttgaaaatagaaaagggtgcgcacgtttggttcctgaaacggaaccccgtgcacacccttgtgcctatattgaatttttcatcccttgtccgtttgaaacggtatgttcaaagccctttatactctgaacatcagatcgccgtagctcggatacggccagtaatcggaagagaccagcgtttccatctcgtccacaacggctctcagatcggtcatggcggtgatgacggaatccttataataggtcgcaacctcaatcggatcttcgccgacttccttcacgccgatgatggcgttatcgagcgcagcaagcttcttatatgcgcagtcctgcaggccggaaagacgcttgatgatatcaagctccgcttcacacggaatgtcatcgctgatggccttcttcgtggcaacgccgcttgcaagctccgcaacgtaagaggaaacagcggggagaatgtcgcgcttgaccatatcacttgcggtgagcgcttcgatgttgatggtcttcgcgtacgtctcgaggatgatgtcctgtctggactgcatctcgacctcggtgtagatcttatgctttgtaaagagcttcacgttcttttcgtcggtgtagtgcggcagtgcgtctaccgtggtcggcaggttcgtcaggccgcgttttgcagcttccgccttccaggcgtccgcatagccgtcgccgttgaagatgatgcgcttgtgctctttgatcacgcgcttgatgagtgcgttgagcgcgccgttaaaatcttccttgccctcaagctcgtctgcaaactgctcgagctcatcggcgatgatcgtgttcagcatgatgttcgggcaggcgatgttgagctgcgagccgaggcttctgaactcgaacttgttgccggtgaaagcgaacggggaggttctgtttctgtccgttgtatcctttgtgaaggacggcagaacgtttacgccaatctccatgttgacgcggagcgtaccgccatagaccgtgccggtctcaatggcgtgcagaatagccgtaagctcgtcgccgaggaagatggagatgatggccggcggcgcttcgtttgcgccgagacggtggtcgttgcctgcggaagcgacggagatacggagcagatcctgatactcgtcaacacccttgatgacagcagcgaggaagaggaggaactgtgcgttttcctgcggcagcttgcccggctccaacaggttctttccggtatcggtggaaatagaccagttgttgtgcttgccggagccgttcacgcctgcaaacggtttttcatgcagcaggcagacaaggccgtggcggagcgcaacgttcttcattgtctccatggtcagctggttgtggtcggtcgcaacgttcgtggtggagaagatcggcgccaactcgtgctgtgccggggcgacctcgttgtgctttgtcttagcaagcacgccgagcttccacagctcttcgtcaagctcctgcatgaacgcggcaattctcggcttaatcgcgccgaagtaatgatcttcaagctcctggcccttcggtgcgcgtgcaccgaacagcgtgcggcccgtgtaaatgaggtccgggcgctcatcgtagagctttttatcgacaaggaaatattcctgctccgggccgacggtcgtgatgacacgctttgttgtggagtcgccgaaaaggcggagaatacgaacggcctgtgcgctcaacgcttccatggagcgcagcagcggggttttcttatccaacacctcgccgccgtaggaacagaacgccgtaggaatgaacagggagtgatctttaatgaatgcgtaggaggtcgggtcccatgcggtgtagccgcgggcttcaaacgttgcgcgcagaccgccggaagggaaggaggaagcatccggctcgcccttgatgagctctttgccggagaattccatgatgatgcggccgtctgccgtcggagaaatgaagctgtcgtgcttctcggcggtgatgccggtcatcggctggaaccagtgcgtgtagtgcgttgcacctttttcaatcgcccagtccttcatggcatttgccacagcattggcaaccgtgatgtcgaggtccttgccgttgtcgatggtctttctcaaagacttgtaaacgtccttcggcagtctctcacgcatgacgtcgtcgttaaacaccatgctggcgaaaatgtccggcacattgatctttgtcgtgctgctcatgtaaaccactctttccttcaataagattcgcataataggaggggcgaacgctgcgatataatttgtatatcttcccgtgcgtttcgtcctgcggcttcgctttacgaaaccgctgcacagctgttcgtaattcattcaaacaaaaaagcgctggggatggcaataaaccaaccacagcgcctttgctatgctatgtgatgaattttacaacgtctcgggccatttgtcaacacctttttttgaggaaatttgaagatttgcaggatgtacaatttaaacctgcgtttataaattcgttttatgaaatttttaaagtcaagcgaatataaaatgaaattgctacaactcaaaaattcaaaaatcgcgaaatttttcttgacatatcagaagggccgctatataatggtaggcagacaatggagtctgatcatacatgttgcttttaaaagctgccgaatgtggggcttttagattgcgccgggggaacggcgcgcgtgcattgcacgcagcatgtatggtcagactttctctttttttcgggaaagccgggaaaaagacgtatatcttatttgttttcagaagggagcagtcttcatgcttagagaaggcaaaagcacagcgggcgatttccgaattccttcggggtgcgccgtatcctccgttttttcccgcagcggaaagcggctggacggttccgatatcatccgctccattgagatcatgcacgaccgttcaaacggccttggcggcggcttcgccggctacggcatttacccggaatatgcggaacagtatgcgtttcacgttttctataataatgtaaaagcaaaagaggaatgtgagaagttcatcaacgagcatttcgatgtcgtgaacctttccaaaattccgatccgcaaaattccgcagatcacggacgagccgcttatttggcggtacttcgtcacaccgctgcacacaaagcttgcggaaagccagctcgatgaagacgagttcaccgcccgctgcgtcaaccgcgtcaatacctttatcgatggcgcgtatattttctccagcggcaaaaacatgggcgtgtttaaggctgtcggctacccggaggatgtcggtcggttctatcgtctcgatgaatacgccggctactgttggacggcgcacggccgctacccgacgaatacccccggctggtggggcggtgcgcacccgtttgcgctgctcgacctttccgttgtccataacggcgaaatctcgtcctacgatgcgaaccgccgctgcattgagatgtacggctacaactgcaaccttttgaccgataccgaggtcatcacctatattttcgattatcttgtacgccgtcagggcctcaccctgcaagaggtcgcaaacgtcatcgcggcaccgttctggacgaccattcagaacaaagacccggaggagcgcgcgcgtctgacgtatttgcgcaatgtgtattccggcctgctcgtcaccggtccgttctccattctggtcggctttacgggtggccttatggcactcaacgaccgcttaaagctgcgttctatggtcgtcggcgaaaagggcgatatggtctacatcgccagtgaagaatccgccatccgcgtcattcagcccacgctcgataaagtctgggcgcccgcaggcggcgagcctgtcatcttcacgctggacaaaaagtaagagtttgtgttctctgagaaatgaggttactataaatggctatcgattttttatatccgcagtacgaggtcgtccgcaaccccgcgcgctgcattgcctgctgtgcctgtgaacgacagtgctccaacgaagtacatgcttacgacgatgagctgaaaatgatgatctccgacgaaagccgctgtgtgaactgccaccgctgcgtttccatctgtcccacgcgcgctttgaagatcgtcaagaccgaccacacctttaaggaaaatgccaactggtccggcgagaccatcatggaggtctaccgtcaggcgagcagcggcggcgtgctgctgtcttccatgggcaacccgaagcccctgccggtctactgggataaaatcctcatcaacgcgtcgcaggtcacgaacccgtccatcgacccgctccgtgagccgatggaaacgaagacgtttttaggtcagaagccgtctaaaatcgagcgcgacgagaacggtaagattaagacgaatatcaccccgcagcttgagctttccgtgccgatcatgttctctgccatgtcctacggctccatcagctacaatgcgcacgaaagccttgcccgcgccgcagaagcgctcggcatctactacaacaccggcgagggcggcctgcatcaagatttctacaagtacggcgcaaataccatcgtgcaggtcgcgtccggccgcttcggcgtgcataaggattacctcagcgccggcgccgccatcgagatcaaaatggggcagggcgcaaagccgggcatcggcggccatctgccgggtgcaaaaattgtcggcgacgtttcccgcacgcgtatgatcccggagggctcggatgctatttcgcccgcaccgcaccacgatatttactccattgaagacctgcgtcagcttgttttctccttaaaagaagcctcaaactacaaaaagcccgtcattgtcaagattgcggcggtgcacaacgttgcagccattgcgtccggcattgcacgcagcggcgcggacatcatcgctatcgacggtttccgcggcggcacgggcgcagcgcctacgcgcatccgcgataacgtcggcatcccgattgagcttgctctggcggcggtcgatcagcgcctgcgcgatgaaggcatccgcaacaaggtttcgctcgtcgtcggcggctccattcgctccagcgccgatgttgtcaaggccatcgcgctcggtgcagatgcgtgctacatcggcacggcggcacttttggcgctcggctgccatctgtgcagaagctgccagaccggcaagtgcaactggggcatcgcaacccagcgtcccgaccttgtgaagcgcctcaacccggacatcggctacaagcgccttgtgaaccttgtcaccgcgtgggagcacgagattaaggaaatgatgggcggcatgggcatcaattccatcgaggcgctgcgcggcaaccgccttatgctgcgcggtgtgggtctgaacgaaaaagagcttcagattctcggcatcaagcacgcgggcgaataagcagaaaagggagcgtaaccatgaaaagagtatatgttgatgaaaaatggtgcctcggctgccatctttgcgaatattactgcgcctttgcaaactccggaaaatccagcatgatcaaggcgctgaaggacaggaccattcacccccgcatccgcattgagggggacaatcaggtcagctttgcggtttcctgccgccactgcacagacccgctgtgtgtgaaaagctgcattgcgggcgcactttccaaaaaggacggcgtggtctgtatcgaccagaataagtgcgtcggctgccacacctgcgtgctggtatgtccctacggcgcgctgatgccctcggaatccggcgtcatgcagaagtgcgagctgtgcatcgaaaacgccggcggcaagcccgcctgtgtgcagggctgtccgaacaaagccatcatctttgaggaaagggactgagcaccatggcaaaatatgtaatcatcggcaactccactgcggccatcggctgtgtggaaggcatccgcagtaaagataaagacggagagatcgtgctgattgcttccgaaaaccaccacacctatgcgcgcccgctcatttcctatttattgcagggcaaaacagatgaggagcgcatgaaataccgcccggacagcttttacgaagaaaatcacgtcaccgcaaagctcggtgagaccgtcacaaagctcgacccggaaaagaaaaccgtaacgttaaagagcggggaagagataccctatgaaaagctccttgtcgcaacaggctccacgccgttcgtaccgcccatggaagggcttgataccgtttccgaaaagtttacgttcatgtcgctcgatgacgcacacgcgcttgaaagcgtccttacaaaagacagccgtgttttgattatcggcgcgggcctcatcggtttaaagtgcgcagagggcatcaaggagcgcgtgaaatccatcacggtcgtcgaccttgccgaccgcgtgctgccgagcatcctcgatgagaccggctccgctatcgtcaaagattttcttgaaaagcagggcatcgagttccacctcggcgatactgccgcaaagtttgcgggcacgaccgccacactcaaaagcggtcttacggtcgattttgacgtgctcgtcattgcggtcggcgtgcgcccgaatacttcgctcgtcaaagatgcaggcggcgaggtgcgccgcggcattgcggcggatgataccggcaaaacaacactgcccgatgtctacgccgcaggcgactgcgcggagagcttcgatatttccgccggcgtcaaccgcgtgctggcgctgttgccgaacgcctatatgcagggcaataccgccggcatcaacatggcgggcggcaaagcgagctttgaccaggcgatcccgatgaatgccatcggcttcatggggctgcacatcatcaccgcaggcacgtatgacggcgagacctacgtccgccgtgacggcgaaaactacaagatccttttctataaagatgatgttttaaagggctatatcctgattggcgacgtggcgcgtgccggtatctacacggcgcttatccgtaatcgcacgccgttaagctcaatcgattttaagctgatctgcgaaaagccgcagctcatggcattcacggcccgtacgcgccgcgacctgctctcaaagcagcagtaagggggagaaacatggaacagaaaacatatacactcggccagcgctatatcggcgcagggcaaagtgcgggtacgattatattgaacgaagtgccgggcaacgcgctcggcgcgtatctggacggcgcaaatattattgtaaattgcagcgcacaggacgcgaccggcgacacaatgaacgcgggcgagatcaccattcacggcagcacgggcgacgcggcaggttacgccatgcgcggcggtgccatctacgtgcagggcgatgccggttaccgcgcaggtatccacatgaaggagtataaagagaaagtacccgtgctcgtcatcggcggcagaacaggcagcttcctcggcgagtatcaggcgggcggcatcatcgtcgtgctcggcatcggcagtgaagatcgccagccggtcggcaatttctgcggcacgggcatgcacggcggacgcatttatctgcgcaccgcgcacctgccgaaggatttgccggagcaggtcgtggcgcataaggcgaccgaagaagacatgcagattgcggcgccgctcgttcaaaactacgcggaaaagttcggtgcagatgccgaaagtcttctgcacgacgaatactacgtgctgcgcccgaacacacagaatccgtataagcagctctatgtgacgaactgattttgcccctgtaattctctgcaaattaaggtttcttttcttgcataaatcgacggtgtattttggcgataaacattgtgcgttctgtcttattgcaaaatacaccgatcttgtgttataatattcaaaagcggtcagcatacgctgtattttggcagaatatctcaaaatgcggcagaaaagaagaacaggtacagcgtgaaagacggcaacaccggatttcacgcgtatttgtatgtttgaaacgcgcttttaaaaaagaaaggaagggttcggcatgcagtatacggagtccgaggtcacagagtttatcacagataacgacgttaagttcatcaaaatggcgttctgcgatattttcggcagacagaagatcatcgccattcagccgagccttttggcttctgcgttcgagggcggcattcccattgatgcttcgcgcatcatgggctttgaaaaagaggcggacagcgagctctttttggtgccggatacctccaccatgtcgcttctgccgtggcggcccgcacacgggcgcgtcgtgcgctttttctgcgacattcgccgttcggacggcaccggcttcgacatcgactgccgcggcatcctgaaaaaagcggttgacattgcaaaacttcatggtataatatttgaatttggggcaagaaacgaattctaccttttcaagaacgatgaaaacggcaatgcaacggctatcccctttgacaacgcgggctttatggatgctgcgccggaggataagggcgaggacgtacgccgcgagatctgcctgacactcgaggatatgggtgtcacaccggaaagctcgcaccacagcggcggcccggggcagaacatcatcgattttcagcacagctctgccattcagtccgcagacgatgtcattacgtataagtctgttgtgaagaccatggcgtcgagaaacggccttacggcgtcgtttgcgccgaaccccattccgggtaaggacggcaacggcttccacatcacgctaacgccgcgcatgcagatgggcgactgttccgaacatttccttgcaggtattctggagcacgccgcagagattaccgccattttgaaccccacggcggattcttataaacgcctcggtgcgtttggtgcgccggagttcatctcttggtcggagaagagccgctggtgctttgcgtataaaaaggaaggcagcagcacaatagaggtacgctcacccgattccactgcgaatccgtaccttgcgtacgctgcgctcatttatgcggggcttgacggctacctcaaaaagacgaagctgccaaagcccgatcttgcgcgcgagacctgcggcaagctgccgaagtctgccgaagaagcgctgcaaattttcgcaaagagcagctttgtccgcaacgtgttcccggagtatttcgtaaagacgtatatccgcacgttcggcaacgggcccgcagatgtgtaaaacaagggggcacagggcatgaatgcgatcattcagcacagcgtcctcatcgtgtccggcacgcaaaaaggtgcggcgtatatcacagagctgctttccccacgcgagtttgcgcccatgacaacggcgctcagcggcggagacgcccggcggctgcttttgcggcgcagctacgaccttgtgattatcaacacaccgctcccggatgaattcgggcacgagctggcagagtatatcacagaaaaattcgtttccggtgtcatggtcattgcaaaagcggagcttttcgatcaggtgaacgacaaaatggagccgtttggcatattgacggtgcaaaagccgctttcgcgcccgctgttttatcaggcgcttcacctgctcatcgccacgcagaaccgctggcagcactttgaccgggaaaaccagaagctcagaaccaaaatggaagaagtgcgcattgtggcgcgtgcaaagtgtatccttgtggaatacctgcgcatgagcgagcagcaggcgcaccgctatattgaaaaacaggcgatggatatgcgcacatcgaaaaaggatgttgcggaaaatatcctgaaaacctatacgtaaatgaatgcgtacagggctgcaccgcagctttgacatagattgcatacagcagaaaagagtaattatttcagggaaagaggaacgtacgttatgggcaacaaagcatatttggtactcgaaaacggaaaggtcttctgcggcgaatccttcggcgcggcgggcgaagtaacggctgaggtcgttttcacgaccggcatgacaggttatctcgaaacgctcaccgataagagctatttcgggcagattgtcgtccagacatttccgctcatcggcaattacggcgtgatcccctccgattttgagggaaagatcatcggtccctgtggttatatcgtaaaagaatggtgtcagtcgccctccaatttccgctcggagggtgatcttgacaccttttttaaagaaagaggcgtcatcggcctttgcggcatcgatacacgtgccctcacaaaggttatccgcgaaagcggcgtcatgaacggtatgatcacaacagagcttacgcatgtcgatatggataagattcacagctaccgcgtgacaaacgcggtggaaagcacctccgtcaccgagatgacgcgccgtgagaacccggagaaaacatgcaccgtggcgctcatggattacggctacaaggagaacatccgccgcgagctcgaaaagcgcggggcagaggtcattgtatgcccgtacaacacgacggcagacgaattgaaagcccttaacattgacggcgtgatgctttcaaacggccccggcgacccggcggataacatcgaggtcattgaaaacctcaagaagattatgaatatgggcaaaccgctcttcggcatctgcctcggtcaccagttgctggcgcttgcaaacggctttaagaccgaaaagctcaagtacggccaccgcggcacaaaccagccggtgcaaaatcttgagaccggccgcgtctacatctccagccagaaccatggctacgcggttgtgtcctccacaatcgaccccgagatcgccgacgaatatttcaacaacgtaaacgacagaacgtgcgagggcgtgcgctataaaaaaatccccgctttttccgtgcagttccacccggaagcctgcggcggcccgcgcgataccgcgttcctctttgataaattctttgagatgatgggaaaataaacagtacccagagcagtatagaaaggattgtttacagctatgccattgaataaagacattaaaaaggttctcgtcatcggctccggcccgatcgtcatcggtcaggcagcggaatttgactacgccggcactcaggcgtgccgtgctctgaaagcggacggcatcgagatcgtgctcgtcaactccaacccggcgaccatcatgacggataacgccatggcggaccacatttacatcgagccgcttacgctgcccaccatcaagcgcatcatcgaaaaagaaaagccggacagcatcctctccggcttcggcggccagaccggcctcacgctttccatgcagcttgcaaaggaaggctttttgaaggaacacaacgtacgcctgctcggcgcttccccggagaccatcgataaggcggaagaccgtcagatgttcaaggatacgatggaaagcatcggtcagccgtgcatcccgtccaaggtcgtcaccacggtagaggatgcactggagtttgcggaagagatcacgtaccccgttatcatccgcccggcgttcacgctcggcggcaccggcggcggtatcgtcgataaccgcgaggagctcatggaggtcgcggcaaacggccttgcgctctcgccgattacccagatcctcgttgaaaagagcattgcgggctggaaggagattgagttcgaggttattcgcgacagcaagggcaacgtcatcacggtctgctccatggaaaacttcgacccggtcggcgtccacaccggcgacagcatcgtcatcgccccggcggtcacgctttccgataaagaatatcagatgctccgcactgcggccatcaacatcatcgacgcgctcggcgtagagggcggctgcaactgccagttcgcgctgcacccgacgtcctttgagtacgccgtcattgaggttaacccgcgtgtgtctcgttcctccgcactggcatctaaggcgaccggctatccgatcgcaaaggtcgcgacgaaaattgccatcggctacacactcgatgagatcgtcaacgccgtcaccggcaagacctacgcagcatttgagcctgcgctcgactatgtggcggtcaagttcccgaagtggccgttcgataaattcgtctacgcaaagcgcaacctcggcacgcagatgaaggcgaccggcgaggtcatgtccatcgccgatacgtttgaaatggccctcatgaaggctgtgcgcggtgcagaaatctcgctcgatacgctcaacatgccgaagttcgcaaactacgaggacagtgccctgtggcagattttaaaagacgcgacggacgagcgcctgttcgccatctacgagctcatgaagcgcggcgtcaccactaaagagatccacgacttcacgatgatcgacatgtggttcctcgaaaagctcaataacctgctcgcgtatgagcgcgagattaaggatcagccgctcacgcacgcacagtatacgcgcggcaagaaactcggctacacggacgaagccctcacgcgtatttgcggcacaaagccgaccttccgtcacgaagcgaccttcaaaatggtcgatacctgcgcaggcgagttcgctgcgaccacaccgtatttctatggcacctacgatacgccggagcagggcggtgaaaacgaagcgatggagttcatcggcaaaagcggcaaggagaccgtcatggttttcggttccggcccgatccgtatcggtcagggtatcgagttcgactatgccagcgtccattgcgtggagtctctccagcgtctcggctatgaagtcgtcatcatcaacaacaacccggaaaccgtttccacagacttcgacactgcagaccgactctactttgagccgctgtgcgccgaagacgttatgaatatcatcaacatcgaaaagccgaagggcgttgtcgtcgcgttcggcggccagacggccatcaagcttacaaagacgcttgcgaaaaacaacgtgccgatcatcggcacaagcgccgacagcatcgacgccgcagaggacagagagcgctttgaagaactgctcgagcgctgcaacatcaagcgcccgaagggtcacaccgttatgacgacggaggaagccctcgcagccgcacacgacctcggctatccggtgctcatgcgcccgtcctacgtgctcggcggtcagaacatgatcattgcatacggcgatgaagacatcaacgaatacatggcgattatcctgcgccagaagcaggataacccggtgctcatcgataagtacctcagtggcaccgagattgaagtcgacgccatctgcgacggcgagaacatcctcatcccgggcatcatggagcacgtagagcgcaccggtatccactccggcgacagcatcgcggtctacccggcaaaggatatcgacgacgagctcagcgcaaagattgttaagacgaccgaaatgctctgcacggagctcaaggccatcggcctcatcaacctgcagtacatcatcatgaaccgcgaaatctacgtcatcgaggtcaacccgcgtgcttcgagaacggttccgtacctcagcaaggtcacgggtgtgcctatgtgcgacctcgctacaaaggtcagtctcggcatgaagctcaccgacctcggctacggcacgggcctctatccgacttcaccgtatacggccgtcaaggtgccggtcttctccttcgagaagctcacggatgtcgatacccagcttggcccggaaatgaaatccaccggcgaagtgctcggcatcggcaacaaccttgaggaggcgctctataagggtctcatcgcctccggcagcaagatgaacaaaaagggcggcgtgttcatcaccgtccgcgacggcgataagaaagagatcggcgagattgcgaagaaattcgacaaaatgggcttcccgctttacgccacgacgggcaccgcaagcgtgcttgcaaagctcggcctcaccgtgaagattgtcgataagattcacgaaagcccggtcaacaccattacgctgcttgaaagcggtaagctggcgtacatcatctccacctccgcaaagggcagaaaccccgcacgcgacagcgttaagatccgcagaaaagcggcgctgctcggcatcccgtgcctcacggccatcgataccgcaaacgccctcgcggacagcctgatgagccgctacaccccgtacaacacggagattgtggacatcaacaacctcaaaaaagaaaaggtcaagctgccgttcaccaagatgtcggcgtgcagcaacgactacatttatatcaactgcttcgaaaacgaagtttcctctccggagttcctctccatctacctgtccgaccgccacaacggcgtcggcggcgacggtgtcatcctcatctgcccgtccgatgtggcagacgctcagatgcgtatgttcaaccgcgacggcagcgagggtctcatgtgcggcaacggcatccgctgcgtcgcaaagtacctcttcgacaacggcatcgtgaaaaagcctgtcatcaatatcgagacaaagagcggcatcaagtcttgcagcatcatgacgatgaacggcaaggcgtacaagattacggtcgatatgggcgcggcagcgcttcgcccggagcaggtgcccgtaaagctcgaaggcgacatggtcgtcaacaagcctgtcatcatcgacggtcacgagtattacatcacctgcgcatccatgggcaacccgcactgtgcggtgttcgcaccgtccatcgataagctggatctcaatgccatgggcccgaagttcgagtataatccgctcttcccggagcgcgtcaacgtcgagttcatcgaggtcgtggacgagcgcacccttaaggtacgcgtttgggagcgcggcagcggcgaaacgatggcctgcggtacaggtgcttgcgcggctgttgtcgcggcaacgctcaacggcaagtgcgaaaaaggcgaggacatccgcgtcatcttaaagggcggcgacctcaccgtgcgctacaccgatgagaaagtgctcatgaccggcggcgcagagaaggtcttcgacggtgtcgtagaagtctaattgatgttaaatagttcggcgttccgcatttttgcggagcgccgaaaaacattttaagaataaaatcagaatttttttctaaaaatttgaagaagataaaaggtaaaaattcaagagaaagcggtgaaattccatgaacaagtacctgaaaaaagcggaaaacggctcgggcatcgaccactatacgcgcgtgccgggcaccggggcaaagcagaagatcacgtttaccaaaatgcacggctgtgcaaatgattacgtgtatattgactgcttccaaaatgatattcaaaactacgccgagctcgcaatctatctttctgaccgccacaccggcatcggcggcgacggcgtcatctacacttgtccgtccgatgtagccgacgcgagaatgcgcatgtataacctcgacggcagtgagggcatgatgtgcggcaacggcatccgctgtgttgcaaagtatgtctacgacagcggcatcgcgaagaaagacgttttgcatatcgagacaaaaagcggcatcaagatctgccgcgtgcatgtcgaaaacggcgaagttaccactgtcacggtcgatatgggcaaagcggagctcgtgcccgcgaagatcccggtcgatttcccgggtgatactgccgtcaaagagaagatcaccgtccttgacaaagaatacgaagtcacctgcgtttccatgggcaacccgcactgcgtcattttcggcaaagatcccgatacgatcgacctcgagaagatcggcccgcattttgagcactttgagaaattcccggagcgcatcaatacggagttcatcgaggtgctggataaccacaccttaaaaatgcgcgtgtgggagcgcggcagcggcgaaaccatggcgtgcggcaccggcgcgtgtgcatctgccgttgcggcgtgtctcaacggctactgcaaaaagggcgaagatattaccgtcaagctgcgcggcggcgaccttgtcatccattataccgatgacggcgtgcagatgaccggcagcgccgacacggtttttaccggcgtcgtagaaatttaattgtaaaaaagccgaaaacggctttgataaaatgaaatagggtattggagaaaaataggtttctcagtcaaagaaaaatataaaagttccactgtaaaaaagaaaggggtaagttctatgacaaagtacattttcgtaaccggcggcgtggtttccggcctcggtaagggtatcacggcggcatcgcttggccgtcttttaaaggcgagagggttaaaggtcgccgcacagaagcttgacccgtacatcaacgttgacccgggcaccatgagcccgtaccagcacggcgaagtttacgtgaccgaggacggcgcagagaccgaccttgacctcggccactacgagcgcttcatcgacgaagacctgaataaattctccaacctcacgaccggcaaggtctactggaacgtcctcaacaaggaacgccgcggcgagtaccttggcgagaccattcaggtcattccgcacatcacggacgaaatcaagaacttcatttacagcgtcggccacaagacgaatgcagacgtcgtcatcaccgagatcggcggcacggcaggcgatatcgaaagccagccgtttctcgaagccattcgtcaggtttcgctcgaggtcggtaaggaaaactcccttttcattcacgtcacacttgtgccgtacctcaaaagctccggcgagcataagtcgaaaccgacccagcactctgtaaaagaaatgcagggtatgggcatctccccggacatcattgtcctgcgctgcgatgagccgatcgatccgagcattttccacaagattgccctgttctgcaacgtaaagccggactgtgttattgaaaacatgacgatcccggtgctgtacgaagcgccgattatgctggagaaaaacaatttctccagcgttgtctgccgcgagctgaacctcaagacaaaagagccggatatggccgagtggagccgcatggtagagaagatccgcggccgcaaaaagaccgtcaccatcggccttgtcggcaaatatatcaaactgcatgacgcatacctttccgtcgtcgaagcactcaaccatgccggctatgagcacggtacgaaggtcgaaatcaattggatcgattccgagctcatcacgcaggaaaacgctgccgaaatgctcaagggctgcgatggtatccttgtgccgggcggcttcggcaaccgcggtatcgagggtatgatctatgccgcacagtacgcaagagagagcaacgtcccgtacctcggcatttgcctcggtatgcagattgccgtcatcgagtatgcccgccacgtgtgcggcatcgcagatgcaaactccggcgaattcgacgagtacggcctcaataaggttattgatttcatgccggaccagtccagcactgtcaatatgggcggcacactgcgcctcggcagctacccgtgcgagatcgcggagggcacgcaaatggcgcgctgctatggcgtttcccatattgatgaacgccaccgccaccgctatgagttcaataacgattacagagagacactcacaaaagcaggcatggtcatcagcggcacctcgccggacggcaggatcgtcgagaccgtggaagtgccgcagaacgacttctgcatcggcgtgcagttccacccggaatttaagtcccgcccgaataaggcgcatccgttattcctcggctttgtcggcgcatcactccataagagggaaaagaacgcataagagacggtaatgaaaatataaaaggtccaagtataaaaagaagggaagaaaccggcatgaaactcaaccaaaactacgcaaaccttcaggaaagctatttgtttctgaccattgcaaagaaagtcgccgcctatacggaggcgcatccggataaccacatcatccgcatgggcatcggcgatgttacccagccgctcgttccggccgtcatcgacgccatgcacaaagcaacggatgaaatggcacacaaggagacattccacggctattcgccggatcagggttatgatttcctgcgtgaagccattcaaggctattacgcaaagcgcggcgtggcattaaagctcagcgaagttttcgtcggcgacggcgcaaagagcgacgtcggcaatatcgtcgatatcttcgcagacgataacaccgtcctcatcccggacccggtctatcccgtgtatgtcgatacgaacgtcatgtccggcagaaaggtgatctacctcgacgcaaacgagcagaacggcttcctcggtatgccggatgaaaacgtcaaggccgacattatctatctctgctcgccgaataaccccaccggcgccgtgtataacagagcacagctcaaagcgtgggtcgattacgcgctcaaaaacaacgctgtcatcctgtttgatgccgcgtatgagtcgttcatcacgcatgacgatctcccgcacagcattttcgagattgagggcgcgaaaaagtgcgccatcgagttctgctcgttctcgaagaccgcaggcttcaccggtgtgcgctgcggctataccgttatctgcgatgagcttgtttcggacggcaccaaggtcaatacgctgtgggcgcgccgtcaggccacaaagttcaacggcgtcaactacatcacccagcgcgccgccgaggccgtcttcacggacgaaggccagcagcaggtgaaggacgtcatcaactactaccgtgcgaacgccaaggtcatggtcgatgcgttcaaggagatgggtgtgtggttcaccggcggcgaaaactccccgtacatctggcataaggtgccggacggcatgacctcctgggagttcttcgattatctcttaaacgaagccgaggtcgtcggcacgccgggcagcggcttcggcaaaaacggcgaaggcttcttccgccttaccgcgttcggtacgctggaaaagacacaggaagccatggagcgcctcaaaaagctgcttaaaaagtaattcaaacgaagtcaaaggggactgtgcaaaacctgcgcagtctcttttttgctcttgacttgtgcagacaagttgctataatgaaactgagcttatttcctacggaggatacactatgcattacaaaaaagatcgcgttgctttaaagccgccgcttggctggaacagctgggattgctacggccccgccgtcaatgaagtgcagcttttgggcaatgcgcgttatatggcagagcacttaaaagcgcacggttggcagtatgtcgtgtgcgacattcagtggtacgagccggaggccgggcagcgccactgggagtataaccgtttcgcagagctgtgcatggacggattcggccgcctcatcccggcggaaaaccgtttcccttccgccgcaaacggcgcgggatttaaacccatcgccgaccagattcacgcactcggtctgaaattcggcatccacatcatgcgcggcgtaccgcgtctcgccgtgcatcgcgccctgcctgtaaagggcacgaacgtcacttgccgcgacatcgctcacgcaaactccatctgcgcgtggaacaccgatatgtacggcgttgacgctgatcgtgacggcgcacaagcgtactacgacgctatctttgagctctacgcttcatggggcgtcgattacgtcaaagtcgatgacatctgcaacgtgaagatcactccgctcgagccgtattccgcgcgtcgcgagatcgagatgatccgccgcgccattgaccgctgcgggcgcgatatggtgctcagcctttcgcccggcccggctgtgctggaagaagcatggcatcttgcgaaaaacgcgaacatgtggcgcatcacggacgatttctgggataattgggactccctcaaagaaatgttctggcggtgcgagcgctggcaggcgcacgtaaagcccggtcagttcccggactgcgacatgctgccgctcgggcatatcaccatcgcggcggacggcatagggcacaatacgaacctgacacacgccgagcagatcaccatgatgacgctgtggggcattttccgctcgccgctcatcatgggcggcgaaatgcgcgataatgatgcgttcacgctgagcctgctcacaaatgacgagcttttaaacctcaaccaaaacggcaccacgcctttgcagcttttccgcgacgaaacaaaagccgcgtggctcaatttcgtaggtagcacgccgtatatcgcacttttcaacctcacggaaaatcgcgccgttgtcagcgccgagctgtcggaattcaccgataaaacgcacgccgaggagatatggagtggggagaagaccgcattcacaaaaacgctttccgctaaaatagagccgcacggcgcaaagctttataaactcatttgaccggatataggaggagaacatcatgctggaaaaactgaaagaagaagtctacaaggcaaatatgctgctgccgaaatacaagctcatcacgttcacgtggggtaacgtcagcggcatcgaccgcgaaagcggtatcatggccattaaaccgagcggcgtggagtacgacctcctgcgccccgaggacatggtgctcgtcgatgtgaacacaggcaaaaaggtggagggcgacctcaatccgtcgtccgatacgcccacacatgtcgagctctacaaggcgtttccgaacatcggcggcgttgtccacacgcatagccgctgggcgaccgtgttcagccagtctggccgcggcatcccggcgctcggcaccacgcacggcgattatttctacggcgaaattccctgcacgcgcaaaatgacgcccgaggagatcggcggcgcttatgaaaaggagaccggcaccgtcatcatcgagacgtttaaggataagtccccggacgacattcccgccgtgctcgtccacagccatggcccgttcacatggggtacagaccccatgaacgctgtgcataacgctgtcgtcctcgaggagctcgcgttcatggcatggcacaacctcgtgcttgaccccacaatcccgcccatgcagcaggagcttctcgataagcactacctgcgcaagcacggcgcaaacgcatactatgggcaggggaaataaagagcgcaaggcttttgctgcgctcacgctttcgctttgcctgcttctttccggctgtgcgcagccgccaaagccggtgacggaagccgaaacgcagacgattctctataccgccgcggggcatgaaacagggcaattctcgtcctcgtgcggcattacgcctgtcggcgacatgctcctgttcgaccgtcgcgtgcggaacgacaatggcgacgtgacgcgtgtttcgtactattgcaaggatttaaaaaacggtgaagaaacgctgcttggcacgttgaaccgcatgtactatgagccgaccgacagcgcagaagcggtcatcggcagccacgtttaccgcatgattccgcttggcaactggtggaatatgcccaataaagacgccgaactcgcgctctatgatttcgatttgaacgcgaaaaccatgcagcgaatcggcaccgaaaactaccgcgtaaccgatacaacgactggcattagcttaacgctctgcgcctatggggagcatttgctcctccaaaaaggcgggcaaattttgcttctcgaccccaaaactgccgaggtgaacaccgtttacaatgcacaaaatggcgtatgtaaagtgctcggtcttgctgcagacgcaaacgcgcacgggttttctgtgctcatgcagtccgcggaaaacccatcgcagttgtcggttcacacctatgaggaaagcggtacgcttctaaatattgccgatctgtctgcgtgcttgcaaaattctgataccgcaaactgggagagcagaaacatcagcttcgctgtgcagggtgactacctgtatttttacggatacgatttcggcgaagacgcaggcgaaaaaccgatttacagtgtactcgcgaaaattgacggcgagacctgcactgaagtcgccgatttcgagcaaagcacagccagttttgtgccgagctataccgcaaaagcagacggctttctgtttgcgttcggcgacattgcctaccgcttttccacccaaaacggctgggaaaagggcacagtcccgctgcaaaacgaagcacttacactgcgcgaatggtactttgacggcaaacactattgggtctcggctgtaaacaaagacggcagtgactgcgcaggagacggcggctatgcacaaactacacgctattgccgcgtggcaaacgcagaactaaactggtcgctgtgcgccgcaccgaacgaaccataaagcaagacccgccgaggaatatacacctcggcgggtcaaattattcgttattcttttataaacgtgtcgagcaatgcgaaaagcgaattcagcataaaatttcctccgtttcaaggtcatcataccatggctttgacatttgtgcaagagtccgctatactaaattaaaacgcgacagatcacggagaacctatatgctcacctattctttctcaaaaatcggctccgaaagcctttatatgtacctgtataagtgtatccgtgaggacattctgacgggcaagatcacgcccggcacgaaattgccctctaagcgcagctttgcggaaaacctcggcgtcagcgtcatcacagtcgaaaacgcctatgcgcagcttgtctcggaggggtacgtctacgccttgccgaaaaaaggcttcttcgccgccaatctggaaaaaagcaccgcgccgcagaaaaaagagagtccccgcacacaaatgcccgtaccgccgaaatattttgcggatttttccagcagccgcaccgacccgcagaatttcccgtttgccacatgggcgaagctcatgcgcgagatcatctcggaaaaaagcgccgagcttatggtaaacgccccatgcggcggcgtgttcgagctaaggtgcgccatcgccgagcaccttagggagtttcgcggcatcgatgccgacccgaactgcatcgtcgtcggcgccggaacggagtacctctacgggcttctcatccagcttttggggttcgataaggtctacgcgctcgaagatcccggctaccgcaaaattgcgcaggtgtacgagagctacggcgtgcagtaccgtttcacgccgatggataaagaggggatagaccccaaagcgctcgaaaaaagcggcgcggatattctgcacatttcgccgtcgcaccacttcccgacgggcatcgtcacgcccatcgcacggcgttacacgcttctcgattgggccgcgcagagcgaaaaccgttatatcatagaggacgattacgattccgagttccgcctcaccggcaagcctatcccggcgctgcaaagcatcgattccgccgaccgcgtcatttacatgaatacgttttcaaaaagccttgccagcaccatccgcatcagctacatggtgctgcccacggcgctcgccgaagcattttacaaaaatcttgggttctacgcgtgcacggtctcgaacctcgagcagtacacgctcgcaaaattcatttccgagggctattttgaaaagcacatcaaccgcatgcgcatccgttataagcaaaaaaaagacctcatcttaaaagagatgaagcgctgcggtttgttaaagcttgcaaaaattgatgccgaagacgccggtctgcattttctcctgcgtgtctgcggacctgtgcccgccgaaaagatcacccgccgcgcggcggaaaacggcgtgcgcgtcaccgggctttcggcgtattaccatacagcgcccgtaaacccgcagaccgcattcgtcatcagctactccgaaattcccgacgcctgcatccccgaagccgttaaccgcttagctaaagccgttacggctgcggtgatgggagagagatgataaaaccccgccgcccgcaaagacaagattttgtctttatgggcggtggggttagtgatatatttcgctttgcaaaatatgaaaggagtgctaccgtatttgtgaagttttccgcgtatgcagaaagtgaaaggaacttcgctcttaacgcgcgcagcacagcgcacggcgaagcaatttcacgataaccgaaggttgttattttactcgccgtaaggcgaatttcgttgaaaaaagaccattgtcattcgacaatggtctttttggtgcaggtaacaggacttgaacctgcatgaacttgcattcatatggacctgaaccatacgcgtctgccaattccgccatacctgcatattctttttgccgtctcgtttgacggctcaattattatagcatgatgcagctgaattgtcaacagctattttttgacttttaagaacttttttcgttttcggtcacgcggtagcacagcgtcatcatgctgtcgttcagatgcacgttttccacgatcgtgtccggatagcgcagggcaatgtcgtagtggctgaaattccagtagctcttgatgccgatgtcataaagcagctccacgaccgatttcacggcactgtccggcacgcacaaaatcgccatcaagggcgcgttttccgagcagaagcggcggatgcccgcagcggggagtacgcgcaggtcggcaatctgctggcccacgacctgttcgctgttgtcaaaaataccgatgagatcaaatcccgcgaaattataagaaatgtgcgtcgcaatggccttgcccaaattgcctgcaccgattaaaatgcacttgtgtgcacggtctacacccaaaatagagccaatctcctcgcaaagttggtgtacgccgtagccgtagccctgctggccgtagccgccgaagcagttgaaatcctgacgcacctgcgaagctgtgaagcccattttttcggaaagctccttggaggaaatacgcgtcaccccgcgcttgtccaagtgccgcaaaaagcggtagtagcgcggcagacgccgaatgaccggcatggaaatatacggtttcttctgcatatcatcacctcgtttgacaaaattttagcacatcataaagacctgtgcaagtgttttttataaataagaaaagaaaaacgggcggccagaccctaaaaaggagggaggccgcccacgcttttcaaatccatgtcgggttacagaagttgctccaaacgatcgcggatcgcgaggaggaagccctcggtgtccactttctttgcattcggcagggtagacatcgccgcaaggtcgccggtcatgatgccgtcctcttcgatcgtctgcaaggttgccttttcaagcttgtccgcaaaggcgctcagctccggcaggtcgtccagctcgccgcgcttacgcagcgcgcccgtccacgcaaacagtgttgcgacggagtttgtggaggttgtttcgcccttcaaatatttgtagtagtgacgctgtaccgtgccgtgcgcggcttcatactcgtaaacgccgtccggggagacgagcacggaggtcatcatggcaagactgccgtacgccgtcgcgatcatgtcgctcatcacgtcgccgtcgtagtttttgcaggcccaaatgtagccgccttcactgcgaatcacgcgcgcaatggcgtcgtcgatcagcgtgtagaagtattcaatgccgactttttcaaacttctctttatattccgcgtcgtaaatttcctggaaaatatccttaaagcggtggtcgtaggtcttcgaaatcgtgtcttttgccgcaaaccacaggtcctgcttcatgctcagcgcgtaattaaagcaggagcgtgcaaagctctcaatgctcttatcaatattatgtaaaccttgaatcacacctggcgttttgaattcgtggatggtcacgcgctcctcagtgccgtccgcttttgtcacaataagctcagcctttgcattttccggcacgcgcatctcgacgttcttatacagatcgccgtacgcgtgacgcgcaatggtaatcggctttgtccacgtcggaatgtacggcgtgatgcccttcagcaaaatcggcgtgcggaacaccgtgccgtccaaaatggcacggatggtaccgttcggcgatttccacatctctgtgaggttgtattccttcacacgcgcggcgtttggcgtaatggtcgcacactttacagccacaccgtattttttcgttgcctcggcggaatcaatcgtaacctgatctttcgtcgcctcgcggtgctccagaccaaggtcataatactccgttttcaggtcaacgtagggggtcagcaaaatatctttgatcattttccagatgacgcgggtcatctcgtcgccgtccatttccacaagcggcgttttcatggggatctttgtaaaatcggacatttcaaagccttacctttctgcggctgcaccgcgaagctccgtgtcacggggggagaatgtgacgctgtttctatcattatcggatatttcgcgagaaaagtcaatcgtaaattgtgaataaactgcatgaaattgcaggaaatacagttaaaccctgcaaaacgtgcatactatgtatttacaggacatcggcggacatgtttgcgctttgcccttgcaggatgcgtaaaagcgtgctatactgatatatgtgaaagtttgtgccgcgtatgattccgcattttctgtgaaaactaagcgcatcttattcaaaaggagcgctgcggcatgaaaagcacaaagaaacgctcgtctttttccatgcaggaaacggacgaagctgaagaagaaaacgaagacctttccgaccgccagaagcagatccgcgagggcggcgcggtcgttaccaaaaaccgaaagcacaccatccagtgcctcaccgtcatcggacagattgaagggcattacgtcgcaccgtcgcagaacaaaacgacgaagtacgagcacgtgatcccgcagattgtctccgtggaggaggacccgaacatcgacggcctgctcatgattttaaacacggtcggcggcgacgtggaggccggtcttgccattgcagagcttgtcgccggcatgcgcaaacccacggtgtcactcgttctcggcggcggacattccatcggcgtgccgcttgcagtggcggcaaagcactcattcatcgcgccctcggcatccatgaccattcacccggtgcgcatgagcggcctaatgcttggcgtgccgcagacgctggagtattttcagcgcatgcaggaccgcattacgaatttcgtcacggcaaattccggcatttcctatgagcgctttatgcagctcgccatgaatacgcaggagctcgtcatggacgtggggacggtgctggacggcgatgaagccgtggcagaggggcttattgatacgctcggcagcttgcacgatgccatggattgcctcgacaaaatgattgccgcagagaagaataagcggcgtgcaaagcccagaaaaggcaagaaatcactctaaaaacggcatttgccgtttacataactttttatttatcgtataattataccgataaaaccgaacaaaaacaaattatctgcagaaaaggagattacataatgtctatttttgaagcaatcattcaaggtattgtacagggcgcaacagagtttctgcccgtctcaagcagcggtcacttgtcgcttgcacagcacatcatgggtgtaaaggtagatagcttgctgtttgacattcttttgcacctcggcacgctcatcgccgtatgtgccgtctattataagctcatctggcggctcattaaggcgtttatttcgctcgttgcagacgtattccgcggcaaatttaaatggaaagaaatggatcatgaccgcagacttttgatgatgctcatgatcggccttatcccgctgttccttttgttcctgccggttccgggcacgggcatgaagttaaaagatatttcggagctgtgggcttcggattcgacgatttggatcgagggccttgcgctcctcatgacaagcgccctgctgttcctcggtatccgtgcttccaagggtgcaaaggtacatcactttacgcgtaaggatggtaaagtcggcgagattcgcggccgcacaaagttccacacggcagacgccatttgcgtcggtgtcacgcagtgcgcggcggcggtgttcccgggcctttcccgctccggctccaccatggcggcaggtcttctgcgcggcatcaaccagcaggcagcactcgattattccttcgtgctcggcatcccgtccattttggcggcagctgtgctcaccattaaagatgcaatcggccagccggtcgacattggcgtcggtgcgatgattgcgggtgttgttacggcggctattgtcggcttcctcgccatcaagctgctcaagtggattgtcaccacgaacaaattgcaggttttcgcttattatacgctggtgctcggcgttataacgctcatcgtttccgttatcgaagcggccacgggcacaaatcttttcaccggcatgccgctttgatccggtgatttataatccggaggtttattttggcgggtaaaaaacaaagtacagcaaagggcagcgcttccaaagcaaaaagcggtgcgaagtcatcggctgccaaaaacacccggagctcgggttctaagtccaatacaaaatcgcgtgcgtcttccgcaaaagggaagagcacgtcttcaaaacagagcgcgcccagcgtagagcagctgcgccagcgcaaccagacagaagctatcctctggttcggtgcggctattttaacggcgtgctttgtactcattccgggaggcagcgtgtggcttatggtgcacaacgtgctgcgcggcgtgttcggcggctgggctatcctgcttgcggtgctgatggggtatatcgccgtcagcaaaacgatggagcagaccaccatgctgcgcggcgggcgcttggcgctcatggtcatgattgtcgtgctgttttgcacggcggggcatgtgtttggcagctttttcccgaaagaaaagagtttttttaagctggtcggcatcttatatatgcatggcgtagagcagggcggggccggtcttgtcggcggccttgtcggcgagctgctcgtcaagtgcgcggaagtgcttggcgcacgcatcatcacgggcgtgctgctgttcgtctccgtgctcatctttacgggcacgtcgctcgcgagcttttttaaaaaaattgcaaagccggcggtcgtcattcgcgacgtcgcgcggcagcgcaaggaagagcgccgcattctggaagaggagcgcggtaatgcggaggaatcgccgtttgaaacggttttgccgcagcacccggtgcgctctgtcccggaggatggtaaaatggaatcgaaaaacaaaggaaagacgccgcgcgtgtatttggagcagcttttcggtgtgcgccgcacggagccggataacgaccccgtagtgctgcacgattacaccgaaagctccgcacagatcaacgcattgatcgacgaaaaccgccgtgtgccggatttccgcgtgcccggcttagagcgtgaagcacagcctgcgcaaaatgtgcagccgacctatacgccgccggtgcaggcggaagtacgccccgcgccgcagcctgctgaaacgccggagacccacgtgccggtggaacgcgaaacggtggaagcgccggtgattatgccgcccgttatgcagacggcaaagccggagtctgcacctgtgcagcagagtgcgtatgcacagcctgcgccgcagccgaccgcaccgacaatcctcgcgccggggtcgtccccggtgacgcccgcgcacagcgcggaagccgccgcggacgcgcagaaggcgacggaagaattcatgaaaaagaagctggaagcagagcgcatggagacccagcctgcgcaatctgcaccgaaggaggaagacagctcgtacatcttcccgccggttacgatgcttgcttccggcaaaaaagtagatgctgccgtggagaccgaagagcttcagacaaacggcaagctgcttgtggaaacactgaaaagcttcggtgtgcagaccaaaattctcgatatttgccgcggcccggctgttacacgctatgaattgcagcctgccgccggtgtgaaaatcagcaagatcacgaacctcgccgatgaccttgcaatgaaccttgccgcgacgggcgtgcgcattgaggcgccgatcccgggcaaggcggccgtcggcattgaggtgccgaacaaggtgaagaccatcgtacgcatgcgcgagcttgtggaatcgaacagctttgtgacttcaaaaagccacttgaccgtggcgcttggccgcgacattgccggtcaggtaacggtggcagacctcagcaaaatgccgcatatcctcattgccggtacgaccggctccggtaaatccgtgtgcatcaactcgcttatcgtgagcctgctgtataaatccggcccggacgatgtgcgctttttgatgattgacccaaaggtcgtggagctcggcatttataacggcattccacacctattggtgccggtcgtcaccgacccgcgaaaggcggccggtgcgctgaactgggccgttacggaaatgctgaagcgctacaaaatttttgccgaaaacaacgtgcgcgacttaaagggctacaacgccctcgcgcaggcaaacaattatcaggacgaaaacggacagcccatgcacaaaatgccgcagatcgtcatcatcatcgacgagctttccgacctgatgatggccgcgccgaacgaggtggaagacgcgatctgccgcttggcgcagatggcgcgtgccgccggcatgcaccttgtggtcgcaacgcagcgcccgtccgtggacgttgtgacgggcctcatcaaggcgaacatcccgagtcgtatcgcgtttgcggtgtcctctgccattgactcccgcaccattttggacagcggcggtgcggaaaagctgctcggtcagggcgatatgctgttctcgccggtcggcgcgcagaagccgctgcgtattcagggctgctttgtcagcgacagcgagatcgaatccgttgtggatttcgtgaagaattcgagaagcgttatttacgacgactccattgcgcaggagattgagcgcagcgctgtggagggctcaaaatcgagcgacagcggcagcaatgacgatgagggcagcggtgacccgatgatgaacgaagccattaagtgcgttgttgaagcgggccaggcctccacgtcgcttttgcagcgcagactgcgtctcggctacgcccgcgcgggccgtctcatcgatgagatggagcagatgggtattgtgggcccgcacgagggctcgaagccgcgccaagtactcatcacctatgcgcagtggctggaaatgaacatgcaaaagcaggatatccccggtgatgcgtaacacaaagcgcggtgcacgggacggcagaaagcttgtgcgcacaggcgcgttggtacttgttttgcttcttttggcgttctgttacatgccgcccggacgggcgatgtggacggagctccgccgcgcatgcggcctgctgccgtttgcacagagcttgcccgatgccgatttgacggtttatgtcatcgacgtgggtaaggcggatgcgatcttaattgaaacgccggagggcgcagtgctttcggactgcgcgacagcggagcaggcgaaaaccgtgctgcgcgttttaaaacagcgaaacattcaaaagctgcgcgccgtgtggatctcgcacgcggacggcgaccacgtgggcgggctgacgcaagttttgcgggaggtgcccgcagaggaggtggtcacctccatgtacacggagctgaccgggctgccggaagatcaaaccgtgcgaacggtaagcgccggggagacggtctcttacggcgaggcggaatttcgggtgttcgcgccttcagaagatttagagagcacgaatgagaattcgcttgtgtataagctttgctacaaggagttttccatgctattctgcggtgacattgaggagaaagcggaaagactgctgctggatatatatggcgacacgctgcgggcggatgttttgaaggtgccgcaccacggcagcgcttcggcgacaagcgatgcattgcttgaagctgtgcagccgcagtatgcggtaatctcctcgggcgaagacagaaatctgctgccgcgaaacgagacgctgaaacggctcgccgaccacggcgttgaaattttccgcacggacgaaaacggcggtattgcgattttgacggacggcgctgaaacgaaaatttacacggaaaacgggaaataacccgctgctatataaaaggtattacggaaaggaacagatgatatgaaacaaatcaccatcgaccgatttgacggtatttacgcgatctgcgaagacaaggacaaggcgtttttcgccattgaaacgagcgagctgccgcagggtgcaaaggccggcgacgtgctgaagattaccgatgacggtgcgctttccatcgacgtggaggagaccgagcgccgccgcgcacgcattttagagaagcagaaaaagctgatggggctgtaagaaggggcggcttatgggaagactgaaatatatttttcactgcattctgcacatggattataaatcgctgttcgatacggtgaaaacggtgcatgaggtgagcggtaaaaaccgtatttggctgttttttgacatcatcaagtgcggctttaagtacggcgcgggctacaaggattaccttttatgcgcgttttatgacctgaatgacaagcagcgtgcgacgtatgtgacgcgcggcatcaataactccattgtaaaaagcctcaacgaccccgcgtattaccatatttttgataataaaagcgagttttacacgacgtttgcggaatatttgcaccgcgagtggctgcatttttccaagtgcacaaaagagcagtttttgaactttatgcaggacaaagacgagatcatctgcaagccggacgacgcttcctgcggcgtgggtgtggaaaagctgaaaaaggccgactacgcaacgctcgacgccatgtacgaggacttaaagaaaaagggcgcggacgtgatcgaagaggttgtcattcagcacccggacatgaaccgcatcaaccccggatccgtcaacaccatccgcgtgtacacggtgctttccgacggtgtgtcgaacgtggtgtacgcatgcatccgcatgggcaacagcgaccgaccggtggataacatcaatgccggcggcatgtattcgccgatcgacctcgagaccggcaaaatcgcgtgcgcggcgtgcgacaagcagcgtatcgtctatgagcgccacccgcgttcgggatgcttgctcaagggctaccagattccgtactgggacaaggtgatggacatttgccgtgaagcggcacataaggtgccgcagatgggctacatcggctgggacgtagcgatcacaaaagacggcccgctctttattgaagcgaacaacatgccgggtcatgacgcgttcccgcagatgccgttgcaggcgccggataagatcggcattttgccggtgttccaaaaatatatcaagggtctgtgatgaccgaggctgattttgtctctttcgggaaggcggaaaggcggcagcagagcttgcacagggcgcttgcggggatcgttaaaacgaaccagatgagcgaaaacggcagacagatctggcccatgatgttgagcggcagggcggagtaatcccacacgtgcagatgaagcacgcggtttacgagcaggccgaataaaaattccacaacggttatgatgagggagcctatggcgcagcgcgccggaaggcttcttcttttcattttttcgcagcatacggcgttgatgagcagcagacaaacgccgccggcaagtgccatggaggcgtgggaatagccgcgccacagcacttccaaaaggggataaaggccgctgccggcgaggaacaacagactgtttttgcggacggtacggttcatggaaaacaactcctttttcatgactttccttttcagtatgcccgctttttgtacgcctattgcaaaagaagcaacaaaatcgaaataaataagcatcaaaaaagatacgcatgctactgtacaaagcggcggaaactgtgtataatcagtacagacagaaagacagaaaggtcggtttcttatgaaaagaattttggttacgggcggcacaggctacattggcagccacacctgcatttctcttcttgaaaagggctacgatgtgacgatcgtggataaccttgtaaacagcaaggcgctggtgatagaccgcattgaaaatttgagcggcaaaaaagtgaagttctttgaagcggatgtgtgcgacgaagacgcgctgcgcaagatctttgcggaggacgagatttttgccgttatccattttgcaggcctgaaggcagtcggcgaatccgtgcagattccgttgcgttactatgaaaacaacctcatttcgacattgagccttttgaaggtgatggcggagtttaaggtgaacaactttgtgttcagctcctcggcgacggtgtacggcaacccggcttccgtgccgatccgcgaggatttcccgctttcgacgacgaacccctacggcacgacaaagctgatgattgagcgcatcttgaaggactacgcgcacgcaaacccggactttaacccgatcatcctgcgctacttcaacccggtgggcgcgcacaagagcggcaccatcggcgaagacccgaacggcatcccgaacaaccttgtgccgtacatcacgcaggtggcggtgggcaagctgcgctgcctcggtgttttcggcgatgactacccgacgaaggacggcaccggcgtgcgcgattacattcatgtcgtcgaccttgcagagggccatgtggcggcgctcaagaaattcgatgatccgcactgcggcgtgaagatctacaacctcggcaccggtgtgggttactctgtgcttgacattgtgcacgcgtttgaaaagtgcgtcggccacaagattccgtatgagatcaagccgcgccgcgcgggcgacatcccggagtgctatgcagactgcacgaaggcgtatgaggagctcggctggaaggcgcagaagacgctggacgacatgtgtgcggactcctggcgctggcagacgcagaacccgaacggctacaacggctgatggcacgcttcgttttagcctcgtcctccgtgaaccgcaaggagattctggaacgcgcgggcatcgagtttacggtgatcgcctcgaatgccgatgaatcgaacgggccgaaggcgccggacgcgcttgtaaaggagctttcccgccgcaagctggaagcggttttgccgaagtgcgaaagtgacgatcttgtaatcgcggcggacacggtggtgtacatcgacggcgaaattctcggcaaaccgaaagacttagcggatgcaaaccgttttatgcacctgctttctgggcatgtgcacacggtgtttaccggcgtgtgcatggcgtatcacgacgagcgcgtttcgttcagtcaggagacgaaggtaaagttctatcctctgacagaaagcgaaatcgcggcttacgtgcagagcggcgagccgatgggcaaggccggcggctacggcattcagggcccggcggcgttgttcgtagagagtattgagggcgactacaacaacattttcggtctgcctgcggcgcacgtgatgcaggaagcgaaaaagcttttaaaggcagacaaaatataagacaggcacgatcagtccttttcggcgtatactggcgtatcggaaaggactgatgatttatgtaccggtatcgccgaagacggtataaacgcggacgcaaacggcgtgtgttagcgcttttgctgctcgttttcgcttttgtgtttgccgagctgcgactgcccgcgatgaaagttgagctgcgcacggcagcgctgacggcgcacgcgcaagggtgcatcgcgaaaacggtgccggagtatctgccgcagaccgtctgcgaaaaggacggggcagagacggcgctttctacatatgcgctcggcgtactggaagcggagctgacggatgctttgcggaaaagcttgaacggcacggcaaaggcgtttgtgccgctcggaaatttaacggggctgatgcttttgaacgggcgcgggatgaagatacccgtgcggttttcggtggaaagtgcggtttcggtgcggtttgaaagcgtcttgacgggcgcgggcatcaaccgcacggcgtaccgaacggtgctgcatattgaagcggtgctgttcacggcggagcgagacggggcggatcctgtgacggtgacggcagcataccccgtgtatgaagcggtgcttgcgggcgacgtgccgcagtacggcgtggtgcgcgcaggataaaaaattgtgaatagccgttggattttcgcgcgctttgtggtaagatactaacaagcatcgaaatatcttgaaatgacacggagttttaacttatgacgcacgaacaggcccggcagcagattgaggcgctgcgggaacagatcgagtatcacaataaaaaatactataccgaggacgcgccggagatcagcgactatgcgtacgacatgctgtaccgccgcttggaaaatctggaagcggcgttcccggagctgaaaacagaggactcgccgacgaaccgcgtgggcgcggcggggtacaacacatttgcggaagtgacgcacaccgtgccgatggagagcctgcacgactcgttttccgaagatgagctgcgcgactttgaccgccgcgtgcgcgccgttgtggacgacccagtgtatgtggtagagccgaaattcgacggcctttccgtggcgttggaatacgtgaacggcgtatacacgcgcggctctacgcgcggcgacggcattacgggcgaagacgtgacgttgaatatcggtacgatcaaatccgtaccgaagacgctcaaagagccgctgccgtttttggaggtgcgcggcgaggtatatatgtcggacgaaagctttttgcggctgtgcgagcggcaggagcttttggaagaaaagccgtttaaaaacccgcgcaacgcggcggcggggtcgcttcgacagaaagacccgaagattacggcgcagcgcacgctggatatttttgtttttaacattcaggtcatcgagggcgagaccatcacgacgcacgcggacgcattgaagcgtttgcacgagcttggctttacggtgtcgccgctttattgccgcacgggcgacatagagacggtaatcgagaaaatccgcgagatcggcaacgagcgcggcacgttctcgtacccgattgacggcgctgttgtaaaagtggacagcttctctcagcgcgaggcgctcggaagcacggcgaagttcccgcgctgggcggaggcgtacaagtacccgccggaggaaaaagagacgacactccttgacatagaagttgctgtagggcgcacgggtgttctgacgccgaccggcgtgtttgagccggtgttcttagccggtacgacggttagccgcgcgacgctgcacaaccaggatttcatcacggaaaaggatatccgcatcggctcgcgcgtcattatccgaaaggcgggcgagatcatcccggaggtcgtttccgtggtctcgaacccggaggataccgtgccgtaccgtttgccggaaacgtgcccctcgtgcggggaagttatcacgcgtgtggagggggaagcggcagcgcgctgcacgaatccgcagtgcccggcacagctgatgcgcaacctcattcattttgcgtcgcgcgacgcgatggatattgacggattgggaccggcggcgctggagcagctgagcgcagcgcttcaggtgcactcgccggctgatttatacgacattacggcacaggagcttgaaacgcttgatcgtttcggcaaaaagagcgcggaaaacctcgttgcggcgatccaaaaatcgaaagaaaacgatttatcaaagctgctgtttgcgctcggcattccgcacattggcgcgaaggcggcaaagctgcttgcgggcgcattcggaaatatggatgctttgattgcggcggacgaggagcagattgcggcgatagacggctttggcggcattatggcgcaggaggtctacgcgtttttcagaagacactcggcgatagagctcattgaccggctaaaagcggcgggcgtgaacatgacggcggaagcggtcacgacggacacgaaattccttggcaagacgtttgtgctgacgggtacgctgccgaatttgaagcgcacggaggccgcagcgctgattgaaaaggcaggcggaaaggtgagcggctcggtctcgaaaaagacgagctatattgtggcgggcgaagaagccggcagcaagcttacgaaggcgcagacgctgggcatccccgtattgacggaagcggagcttttgacgcttttaaacggtgaggacaacacggaaaggaacgaagcataatggcagaagaaagaaaaacggacgaagcgcttgaaaaagccgtggagaccgatgaggacattgaccgctatatccgcgagctgacgggaaaggaaacgccgaaggacaaggagaagaaggcggaagaaaagaaagcgccggaaaaagaagaattccgcgtgacgagccagatcggcgaggacgactacaaggcattcatttattactctacgcttgggcgctttaagtggctcatcccggcgtttatcatcgtgccgctcgtgttctcgttcctctttgcgttcaacgcggggcatttttacgtgggcaatttcattttatcgctgcttgtcatgtatgtggcgattacgctgattgttgtcattcgctgcacgcgctggctttctaaaattcgcaacaataatcctgccgtgatgcacctgacggagacgacgcttattttcatgacgaacagcgtcatcaacatgaaaaacggcaaccgcatcaaggtcgattacaagcacatgatcgacgtgggcgagagcagacagcactacatcatgtattttgataacggcaaatccatggtattcagaaaagaagacatggaaaaggaaacgttggaaagattccgcccgtttatcgaatctaaagtacataaattaaaatttacacagatgctcaaaaaataaaccgggaggtttttcagcatggtcatcgatttaaaaacactgtacggcgcggaagcggccgagcagcagaagcgttatgaggagctttccgcttactttgcggaggagttcggggatgccaatgcgctttcatatttcagtgcgccgggcagaaccgaggtgggcggcaaccacaccgaccacaacaacggcaaggtgctggcggcggctgtgaatctggacgttattgcggcggtgaagaagaccgagaacggcgtgatccgcctgaaatccgtcgggttcccgatggacacggtcgatacggcagaccttaacgtgcaggaagcggaaaaggagcgctcggcgtcgctcatccgcggcgtgtgcgcacgcttaaaggcgctcggctatgaagtgggcggctttgacgcggtgacgacctcaagagttttaaagggctccggcctttcaagctccgcggcgtttgaggtgcttgtggtgacgattttaagccacctgtataataacgacgcgatcgaccccgtggaggcggcacagatctcaaaatttgccgaaaacgtgtacttcggcaagccctccggcttactcgaccagatggcggcgagtgtaggcggctttacgacgatggactttaaagacctttctgcgccgaagattgagaagatcgattttgaccttgaccgttacggctatgcgctgtgcgtcgtcgatacgggcggaaaccatgccgacctgaccggtgaatacgcagccattccggcggagatgaagcgcgttgcgaaggcgcttggcggcgaagtgctgcgcgaggtaagcgaggaggagttttataagaaaattcccgagctcagaaaagaagtcggcgaccgcgcgattttgcgtgcgattcacttcttcgacgacaaccgcgtggtggatcaggaagtggcagcgctgaaagcgggtgactttgagacgttcaagcagtgcgtgattgcctcgggttattcctcggcgatgaatttgcagaatgtgttcgcagttgtgaatccgcaggagcagggcttgtccctcgcgttggcacttatggcgaagatcctcggtggcaagggcgcgtatcgcgtgcacggcggcggctttgccggcacggtgcaggcgtatgtgccgctcgatatgctggacgcgttcaaggcagagatgcagagcgtgtttggcgaaaagagctgctatgtgctctccgtgcgcagcgcgggcggcacgaaagtgacaatcgaataagtttaacggcggctttggtttttagagccgccgtttttgcgtattgcgggaaatacgtgttgcgaaattgtaaatattgggaaacggtggatttcaccttgcgaatcatgccgatttgtggtatagtatactctgtatcattatgacagcttaccgcagacagcttgtctgcgtgcgataaaggagaatgttttttgaaggataaagaaatcaccgttacggcagacgagctgcaaaagcagaagctatacacggcggacgttgcggcgatcatgcaggtgcgcgcgatgcacggcacgccgaaggcgcttgtgcgcacgtatggctgccagcagaatgtggcggacggcgaacgcatgaagggtatgctctctgaaatgggctttgaattcacggaagatgaagatgaagccgattttattctgttcaacacctgtgccattcgcgagcacgccgaagaccgcgtgttcggcaacatcggcgcgctgaaaaacgtgaagcgccgcaacccgtcgctgctcattgccgtatgcggctgcatgatggaacaggagcgcgtggcggagcgcattaaggcgtcgttcccgtttgtgaacatcgtgttcggcacgcacgtcatccaccgactgccggagatgatgtacaccgccgtgaccgactcgaagcgcgtttttttgcgcgggcatgaatcgaaagagatcattgaaggcctgccggtgcgccgcgacggcaacacacgcgcgtgggtgaccgtgatgtacggctgcgacaatttctgctcgtactgcattgtgccgtatgtgcgcggccgggagaagagccgccacccggatgccatcgtcgccgagtgccgcgagctcattgagcagggctacaaagaaattacgctgcttggacagaacgtgaactcctacggcaagggcttgccggagaaagtgaatttttcggagcttctgcgccgcattgacgcgattgacggcgactaccgtttgcgctttatgacctcgcacccgaaggacgcgacgcacgagctgttcgacacgattgcggagagccggcacatctgccactacatccacctgccgtgccagtccggcagcagccgtgtgttaaaggcgatgaaccgccactacgaccgcgaaaaataccttgacctcatccgctatgcgaaagagaaaatgcccgatctgtcgctgacctccgacattatcgtcggctttccgggcgagacgtatgaggagttctgcgagacgctgagcctcatccgcgaggtggagttcacgtcgctctttacgtttattttctcgccgcgccccggcacgagagccgccgaaatggaagaccctgtcacgtacaaggagaaaacgcagtggttctcggagcttttgaagacacaggaggagattgccgcaaagcgctgcgcttccatggtgggcagcacggagcgtgtgctcattgaagagcgcaacgagaaaaacggtttgctcagcggtcgcaccgcaagcagcatcattgtggaattccccggcgaagacgaatggatcggcgaattcaaaaatgtaaaagtgaccgaagcgcgcaactggattttgcgcggcgaatgtgtagactaagcaaaacgggttttgacccattgctttttcaaaatacaataaaatttataatttattttaaggagctattactatggatatcatgaaactgacaagagaactcggccgcgctttgcagcaggaccagacctacatcaacatgagcgttgcggagcagcagtgcaacgaggacgaagctttgcagaacgccatcggcgaattcaacttaaagcgcatggccatcaacaacgaggcgggaaaggaagaccgcagcgaggagcttatcgagcagtacaacaaagaactgcgcgagatttacggcagagtgatgcagaacgagcacatggcggcgtatcaggcggcaaagaacgagtttgatgcgctgatgcagcgcgtgacgggtgtgctttccatgtgcgcggagggtcaggacccggatggctgcgatcccgatgcctgcggctgcaccggcagctgtgcgacctgcggcggtggctgccactaaggcagaattttgcaaagtttgcacgtgatctgcttgcatcttttccgccataccggtcgtaaagtccttgacaggcgccagcctgcctgcggaatttactacgcaaggcgtatacgctcatgacgaaaaatctgacggcgcatctcgcgcacctactttacaaaaatctgcctttggcagtaattcacttgttgactgaatcttaacgatatggaggccgggcatggctgattattccccgatgatgaaacagtactttgaagtgaaggaaaagtacccgaacacgctccttttctttcgccttggggacttttacgagatgttctttaacgatgcgaaaatcgcgtcgcgtgagttggagctgacgctgacaggccgtgactgcggccaggaggagcgcgcgccgatgtgcggcgtgccgttccacagcgcggagacgtatatcgcgcggcttgtggcaaagggctacaaggttgctatctgcgagcagatggaagacccggcgcttgcaaagggcatcgtaaagcgcagcgttatccgcgtcatcacgcccggcaccgttatggaaagcagcatgctcgacgaggcgaagaacaactacatcgcttccgcgtattatcagggtgataaggtgggcatctgctttgcggatatttcaacgggcgagctggaggcaacgacgctgacggcggagaagggcgagacgctctcccgcgcggtcatcgacgcgctgtcgcgatttacgccgcgcgaaatcctcatcaacccggaatttaccgatttgacggacgtggcgaaattcatttccgataagctttcggcgtcactcgagtgcatggattttgcggtttacgaaccgctgcacgcggaagaaacggtgaaggcgcagtttcaccccgaggttttggaacgctccgacgttttgaatttcccggagatcacggcggcgctgagcgctttgctcgagtatctcagccgcacgcaaatcacgggtttggagcgcatggaggaaattcgcatatattcgcaggcgaagacgatgcggcttgatttaaacacgcgccgaaaccttgaattactcgagacgatgcgcagcaaggagcgccgcggctcgcttttgtgggtgcttgacaagaccaaaacggcgatgggcaagcggcttatccgcacatggctcgagcagccgcttttgagcccggcgggcattacgctgcggcaaaacgcggtggaggagctgtttgagaaccgcccgcttttagacgatgtgaccgaggcgctgacgggcatttttgacctggagcgcattatgacgcgcgtggtgtacggctctgtaaacggcaaagacctgcgtgcgctgtggtcggcgctgacgcgcttgccgcagctgaaagcgctttctgcgacgtttaaagcgacgatgctgcgcgacatcgacagccgcatggatgtgctctccgatatttgcgaactcatcgaccgcgccgttgtggaggagccgccgcacacgatccgtgagggcggcattatccgcgaaggcttcaacgcggagcttgacgaagtgaaaagtgacatgacgaacggcaagcagctcatcgccgagctggaggcgcgcgagcgcgaagcgacgggcattccgaaactgcgcgtggggtataaccgcgtgttcgggtattaccttgaagtttcgaacgcgtttaaggacaagacgccggagcactacgtgcgcaagcagacgcttgcaaacggcgagcggtacatcacgcaggaattaaaggagcttgaaaaccgcattttaggtgcgcacgaccgttctattgcacttgagggcaagctgtttgaagaagtgcgcaggacgattgcggagcagctgacccgcgtgcaggagacggcgaaggcgattgcggagctggatgttttggcatcgtttgcggcggtatctgtgcggaacgactacacgcgcccgaccattacggcgaacggcaggctgtatttaaaggacagtcggcacccggtggtggaggcgctgctgacgggcagcgcgccgtttgtgccgaacgaccttgagatggacccgaaccagaaccgtgtgtctatcattacgggcccgaacatggcgggtaaatctacatatatgcggcaggtggcggtcattgtcatcatagcgcagatcggctgctttgtgccggcgagcgcggcggagatcggcattgtggacggtatctacacgcgcgtgggcgcttccgacgaccttgcggcggggcagtccacgttcatggtggaaatggccgaggtggcggaaattttgaagagcgccacgaaggacagcttgctgattctagatgagatcggccgcggcacctcgacgtttgacggcatgagcattgcgcgggcggtcatcgaatacgtacacgacaaaaagctgtgcggtgcgaagacgctgtttgcgacgcattaccacgagctgacggagctggaagaccttttgcccggtgtgcagaacttcagtattgcggtgaaaaagcgcggggacgacatcacgttcctgcggcgtatcgtgcgcggcggcgcggacgacagcttcggtattgaggtcgcgaagctcgcgggcgtgccggacaaggtggtgcggcgtgcgaaagaggtgttaaagagccttgaaagcggcgagatggtgaaaaagccgaaaaacgccgtgaaagtgcagcaggaggaaccgatacagctgacgatgctgacaaaggacacggaggttttaaaccgcctgaaaagcctggacgtcaacacgctgacgccgatcgaatccatgaacattttgtttgaacttgcaaatatgctgaaataaatttaacgcgaaaggaaggtgcagaaaatgccgaaaattcacgttttggaaaagcaggtcgcggagctgatcgccgccggtgaggtggtggagcgcccgtcttccgtcattaaggagcttgtggaaaactccattgactccggcgcgtcgattgtcacggtggaaattcgccgcggcggcgtgacgtatatccgtgtgacggacaatggctgcggcattgcgcgcgaggacgtggcgacggcatttctgcgccatgcaacgagcaaggtgcgcgaaaaggacgacttagacgcgattttgacgctcggcttccgcggtgaggcgctggcgtccatttcggctgtgtcgcgcgttgacctcatcacgcgcacggcggacagttcaatcggcatgcactattcctccgagggcggcagcaacgtggagattgaagacgcgggctgcccacttggcacgaccattacggcacgcgacctgttttttaacgtgccggcgcgtatgaagtttctgaagaaagacaccgcagagggcaactccgtggcgggactgatggacaaaattgcgctttcgcatccggaaatctcgttccgcctcattcgcgagggtaaggaagtgctgcacacgccgggcgacggcaagctgagctcggcgatctatgcggtgttcggcaaggagttttccggcgctttgctgccggtggattataccttgggcggcattcgcgtgcacgggtatatctcgtcgccgattgcgagccgaccgaaccgcagcatgcagaatttcttcatcaacgggcgttttgtgcgcagtcgcacggcgtgtgtggcgctggaggaagcgtacaagggcgcgattatggtgggtaaattcccggcgtgcgtgctgcacatcgagctgccgtcgtcggtcgtcgacgtgaacgtacatccggcgaagctggaggtgcgctttgtgaacgagcgtccggtgtttgatgcggtgtaccacggggtgaaatccgccgtgacagcgagccgcgatatgaagtctgttgaccttgcgcagcacgcaaggcggcctgtcgacccgtataagccggatgtggtcgtaaagccgcagcaaatggtgctgaatccgccgccgaaaacggagacggtgaagccgatgtctgcgccggtcgtgaagtctgcgcccgttatcaacacgagcaaaaaagaggcggaagcgccgtatgagccgcccgtcgatatgccgccgatgccgcatacgttctcggacagcgcagagcgggaggaaaagccgcagcttgaaaggattcgtacgtcgatcgagcgcgttttggaggcggagccgcagccggtgacaaagccggaagtgagaacggaaaaaccgcccttaccgcagccgcccgagacggagcccgtgccgccggcgtgggaggaaacacccgtgcagacggaagcggtgcaggaaaatccggaaagcaacgcacagccgaaaacacgcattgtgccggagacggagcgggatttaccccgcacggcgcataaggtgatcggcgaggtgtttgacacgtatatcatccttgaatacgacgcgcagacgctgatgtttatcgacaagcatgcggcgcatgagcgactgctgtacgaaaagctcaaacgccgcgaagaagctgctatggcgcagacgctgcttgtgcccgtgacggtgacgatggacaaaaacgaatacacggcggttttgcagaatttgagtgtttttgagcaggcgggctttgacgtggaggatttcggcagcggtaccgttttggtgcgcagcgcgccgcttaatttgaacggtgcggacatcaaggactccgtgctcgaaatggcgggataccttgaagaaaacaagaacgacgcgacgacggagcacatggactggctgtaccacaacattgcgtgccgcgcagccattaagggtgggaacgcctcgaaaaaagaggagctcattgcacttgcggaagagctggaagcgaaccccgatgtgcgctactgcccgcacggcaggccgatctacgtgatgttgaaaaagcgaacgctggaaaaagaattcggcagagtttaacggtttgctcacaaacacgggcgaaagttgtgttattataaagttatgtaaacaaaaggaggcgccggaatgacggaagtacaagagaaaatcaaggtattcgcagtgtgcgggccgacggcctccggcaagacctcgctttccgtaacgcttgcgaaaaagctccatgcggaggtggtttcgtgtgactcgatgcagatttataggggcatggagatcggcacggcaaagccgaccgcggacgagatgcagggtgtgccgcaccacctgatgggttttcaggatcccgcggagccgttcagcgtgagcgactatgtggcgcttgcgggaaaggtgatcgaagacatacatgcgcgtggcaaaaacgtgttgcttgtcggtggcacgggcttatatgcgcgctcgcttttaaaggcggtgccgtttacggaaaacagccgcgacgatgaaatccgcggtaatttggaagcggaatttgcggcagacggcattgaacctctttatgcgcggctaaaagagcttgaccccgagggggccgagggtatccatccgaataatacgcgcagggtcatccgcgcgcttgaatactgcatggtgacgggcgagccgttctcgaagcaggcgaaggactcgaaagcggtggaatcgccgtatgacgggaaaatgttggtgctgtctttcagagaccgcgagacgctttacgggcgtatcaacctgcgcgtggagcagatgtttgcagacggcctattaaaagaagccgaggattattttaagcggtatggcacgccggggcagacctccgtgcaggccatcggctacaaggagctgttcccgtattttgaggggcagtgctccttagacgaagcaaaggaaaatataaaaagggaaacacggcgctatgccaagcgccaattgacgtggttccgccgggaggaagatgtcgtgtggctttttgcggatgattttgatgccccggcagacctgataagcgcggcagaggacatagcccgcgcgcattttgaagactgaaaggaagccccgctatgggaagcaacacattatttcgtaaaatcagttcgatcgccgtggcgattttgcttttgatatatgtaggctaccagatttacagaagccaatacaccggctttaaaacggaaacggccatgtacgctgatctttccgcatccatcgacaccacgggctttattatccgcaatgaggagcttgtgtactcgcggtacgacggcgttttgaactacacgctcgacgacggagagaaaacggcgttcggcggcacggtagcagagctgtaccccgcggaagaggacgccgccgcacacaaccgcatgctgcgcatcgacgaggagcttacgcggctagccgtgctggagaaccccacagaggtcgcgtcctcgaacccgaagaacatcggcagccagatcaataaaacggtcacagggctgctttccgatttgaaatccggtgcgttttcgtcgatctcgaacgataaaaacgacctgtacctcttgatgggccaaaagcagattgtgacgggcgcggaggattccgcgagctatgtggcgcacattgagaatttgaaatcggagcgtgcaacgctggagacgacaacctcttcaagcaccggcacggtaacgtcgccggcttccggttattttatccacacggtggacggctacgaaaacgcggtggacatcgacgatgtggagcagctgaccgtaagcgatgtgcgtgcgctggaagaaggcgaagcgggcagcaatgcggacagcacggtcatcggcaaggtggcaaaggaattcaactggtacattgcgtgcatcatcgatgaaaacgaccttgtgcggcttgaccgcacgacgaacgtgaaggtggagatgccgtttgcgacggcggagacaatcccggccgaggtcgtgaagatcaacagggacgaagcgagcggggacgcagtggtcattttgaagtgctcttacatgaacacagaccttgccgccgcgcgcaaagagccgctgcgcatcgatttacagtcgtatgccggtgtgctcgtgaacgaaaaggccatccactttgcggacgtgaccgtgacggatacggacacggacggcaatgtgacggagcatgtggaacagaacgtgaagggtgtttacatcaagtccggcagccgcgtgcgctttgtacaggtattctccgatgcgacgatcgacggctatgccgtgtgcaagctgaacctttcctcctcggaaaaagagcagctcgtcacctcgagaacgatacagctttacgatgaagtcattgtggaagggacggatctttatgacggaaaaatgctttgaggagcgttttagggacgtagaggaaaactataaggtcatcacgaaccgcattgcggaggcagcggtgcgctccggcagaaagcccgaggacatcacgtttcttgcggcgacgaagaccgtgccggcggaggtcatcaaccacgccatcggctgcggcctgcgcttcatcggcgaaaaccgcgtgcaggaattcatggacaaatatgaaaagatcgattgggacaagggcgtttccggccagatcatcgggcgcttgcagacaaacaaggtgaaatatatcatcgataaggtcgactgcatccagtcggtggattccgtaaagcttgcaaaggaaatttcccgccttgcggagaaaataggccgcaaaatgccggtgctcattgaagtgaatatcggcggggaagaaagcaagggcggcattgaaaaagctgcgctgcccgcgttgttggaagaaattgccgtgctgccgggcattcaggtgaacggattgatggcaattccaccaatttgtgcggaaaaatccgcgctatgcaattatttttcccaaatgcatcaatcttttattgacatccgcgccaaaaaaatagataatgtatttatgaattgcctttcgatgggtatgtcttccgattacgcggaggccatcgagtgcggcgccactatggtgcgcatcggctcttcgcttttcggtccgcgcgactacacgcgctgaccgaccctgttatgcagaaaatggaggtataatatatggcaggcattgtagagaagcttcagaaaatgtggaacccgcccgacgacgagtatgatgaatactacgaggacgaggccacggagcccacggcagacagccgcgaggagcagccttccgcacgccgttcgttctcctcttcaagctcgaaccgcgttgtgaacattaaccacgcacgcgcaggcgcacaggtggttgtgtttaagccgaactctttccgtgacgacacaaatagcattgcggatgagatcaaccagggccatacggtcgttgtgaattttgaagagacgaatgcgagcgaggcgcgctatattctggcgttcctcagcggcgcttcttacgcgaaccacggcgaggtgagacccatcgccgcgaagacgtatattttcacgcctgcgggcgtgagcctgagcggtgcggagattcgcgatgatcttgcacagaacggcgtaacgttctgatatggccgcacaggaagacaagctttttgaagcgaaaatagaggattgcctgcgccttggcgaaaaaaggccggcgtttttgggctttttggatctttccgagcgcgcgtacgcagaagaatatttgcgccgtgcacatgcggaaaattaccggtttttcggtggctttcccgaagcggagcgaacggttttgggcgtgtttccggattatatggagcccgtagatgaggagtttccggtgacggggctcacggtgaagtttcgccggcaggatgcgctttcacaccgcgattttatgggctcatttttggcacagggcgtggtgcgtgcatcgctcggcgatattctggccgaagaagggcgcgccgtgctgtttgtgaaaacagagcttgcgccgcactttctttcgcagatcgataagatcggtcgggtgggggtgcagattacaaagggctttacagatccgctgccgcaggcgcacagttttcagccgatgggcggcgtggtcgcttcggaacgcttagactgcttggttgcctttttggcgggcaccggcagggaaaaagccgcgcagatggtgcacgcgggtctggtttccgtcaaccatagggagatggattccgtttcgcaccgtgtaaatgaaggagacatcatctccatacgccgctgcgggcgatttattgttgatatgctcggcccggtcacgaaaaagggccgtttatctgtgaaatgcagaaaatacatataggaggcttacacacatgttatcgattaaagacatcaatgaagtcagcttcagaaaatcaaatttttccggttacaattctgatgatgtcgatcagtttattgatgaagttttggagaccgtaacggcgctcacaaaggaaaacgcagagattaaaacgcgcaagacggatgattccgccgctgtgcagcagttacaggcgaaaaacgccgagctgcaggagaagctttctattttggctgcaaaaattgagtcttaccgtgcagaggaagacggtattaaggacgccatcctcagcgcacagcgccttggcaatgcttccatccgtgaggcaaaggcgaaggccgagaagattgtgaacgacgcaaacgcgaaggcggacgctcttgtaaaagatgcgaagggccgctccgaaacgcttgtgaagtcctatgaaaagcagatcgccgcaaaagagaaagagctggagaacatgaagcgcgaggtgacaaacttccgtgcttcgctctacggcatctataaagaacaccttgccgtgattgagaagattccgacgtttgacctgccggaggaagagcaggaggaaaaagcgcccgccgaggaaccgacgccggtatacaccgagcccgaagtgattgaggagccggaagaagaaatcccggtgcctgcagcacagcaggtcgaagaggaacccgcaccggcccccgcagagccgaagcccgctcccgcacctgtcccggagccgatccccgcaccggcgccggtacagccgcagcctgtttacgacaaggactcttatattaaggagcagttcagcggcatcggccttgatctgaacgcttacgccgacatcccggaatctttgcagaaagaaaaggaggcccttttcagcacgctggagttcggcgttgaagacgaaggcgacaagaaaaagggtaaatttaagagaagataaaaccagcagaaaggcacggatcaatatatggattacaaaagcacattgaacctccctaagaccgactttgccatgcaggccggcctaccgaagcgcgagccggtaatgctcgaaaagtggtatgaagacaaggtttacgagaccgttctcgaaaagaacgacggtaagccgctttatgttctgcacgacggccctccgtatgcaaacggcgatatccacctcggcacggcgctgaataagacgctgaaggactttatcgttcgctacaagaatatgtccggctttaaggcaccgtacgttcctggctgggatacccacggcttgccgaccgagctgaaggccagaaagaaagcgggcgtttcgaattccactgcaatctccgacatcgagctgcgcaagctctgccgcgagtttgccctcggctacctcgatgagcagcgcaactccttcaagcgtcttggcggcatcggtgaatgggacaacccgtatgtcaccctgcgcaaggaatttgaagcaaagcagatcgagatcttctccgaaatggcgacgaagggcctcatctataagggcttaaagccggtttactggtgcccggagtgcgagactgcactggcggaagccgagattgaatacgcagaggatccctgccactccatctatgtgaagttccgcgtgacggacgacaagggccttttgaccccgatgggcgcagacctgagtaagacctacttcgtaatctggacgacgacgacctggacgctccccgcgaacgtcgcgatttgcgtcggcccggaatttgaatatgcacttgtaaagtccggcgacgaatactatgtgatggcaacggccctgaccgaatctgccatgcaggcggcgggcaagaccgattacgagatccttggcaccttaaagggcagcgaccttgagtatatgaagacggcgcacccgttcatcgaccgcacatctctcgtcatcgtgggcgaccacgttacgttggaaagcggtaccggctgcgttcacacggctccgggccacggcgtcgaagactatgacgtctgccacaatcactatcccgaaattccgatcgttgtgccggtggacagccatggcaagatgaccgaggaagcgggccagtttgcaggcctgacgaccgaggaagcgaacaaggcgattgcacagcaccttgaggatacaggcgcactgttcgctttacagaagatcatccaccagtatccgcactgctggcgctgcaagaagccggttctgttccgtgcgaccgagcagtggttctgctccgtggacgctatcaaggatcaggcgattgaagccatcaagggcgtaaagtggatcccgggctggggcgaagaccgcatttcctccatggtccgtgaccgcaacgactggtgtatctcccgtcagcgtcgctggggtgtgccgattccgattttctactgcaaggactgcggcgagccgctcatcgagaaggacgcgatgcacgcagtttccgagctgttccgcgcagagggctccgatgcttggtacatcaaggaagcggaagaaattctgcccgcaggcacaaagtgcaagaagtgcggctgcacctcctttacaaaagagcgcgacatcatggacgtttggtttgattccggcgtgacccatgctgccgtttgcgatacacgcgattatctccattggccggctgacctgtaccttgagggtgcagaccagtaccgcggctggttccagtcttcgctgctcacgtccattgcatggcgcggcaaagcgccgtacaaggctgtcgtcacacacggctgggtcgtggacggtcagggcagaaagatgagtaagtccctcggcaacggcattctgccgcaggagattgtggataagtatggcgcagatatcctgcgtctgtgggtcgcttcttccgactaccatgccgatatccgcatctccccggaaattctcaaacagctttctgacgcatacagaaagatccgcaacacagcacgctatatgcttggcaacctttccgattttaatccggataccgacagtgtagcggtctctgagatgctttccatcgataagtgggcgctgaaccgtttggatcggctgatggtgaaggtgcgcgagggctatgagtccttcgagttccaccaggcttaccacgccatccataacttctgcgttgtggatatgtcgaacttctatctcgacgtcatcaaggatcgtctgtacaccgagaagaagaactccgctgcacgccgcgccgcgcagactgcgatgtatatcatccttgatgcgatgacccgtctggtcgcgccgatcttggcgttcacctccgacgaaatctggcagagcatgccgcacgcttccgattgcgatgcacgccacgttgtttacaacgagatgccgaagccgacgagcgaaaagtacggcatcgacgtgacggaagaattcatcgcacgctgggatagaattcatgcaatccgcgatgttgtgaagaaggcgcttgaaaacgcacgtgcagagaagacgatcggtgcatcgctcgatgcaaaggtcacgctgttctgcaccggcgagctgtatgcgttcctcaagtctgtggaagacgagcttgcaaccgtgttcatcgtatctcaggtcgagatcgtggacggcgagggcggcacactttccgacgatgcactgggcctctccgtacaggtcgataaggcagaaggctgcaagtgcatgcgctgctggacatattcctccacggtcggcaaaaatccggcatacgtggatctgtgcgagcgctgcgcaaaagcactttccgaataatttcggacacattgaatttgttttaaacggtacgtgcttaatgacgccgtgctgttgaataattgaaccgaaccaaggtgcaaaccggttttgcccggcttgcgcctttttcgggttataaggggatatttcttttgtccattctcattcttttgctgatcgccgtgctgacagctgtcgatcagtttataaaaatgacggttatcacaaacttaaagcccatcggcagcgtgacgtgcattccgggccttttggagttccgttaccttgaaaacaacggcgcggcattcggcttttttgccgggctttcgtggcttttgatcatactgacgatagggcttatggcagcgttgctcgtgtttttgttccgctataagcaccacacatggatgtcgcgcacatcgtgcgtgctcatcatcgcgggcggcatcggtaacctcattgaccgttttattttcggctatgtggtcgattacatccatgtgctgttttttccgtatgtgttcaactttgcagactgctgcgtggtggtcggtgcgattttgtttgccgtgtggtacttattctttaaagacaaaaaagaagcggcagataaaaaagtgaacgagccgacggaaacgactgccgacggggtcgggaaataagtatggcggagctgcatgagattgaggtcacagcggcgggccagcgcgccgataaactgattgcggaggcgctgccggagctttcccggtctgcggtgcagaatttgatccgcgacgggcatgtgacctgcgataataagattgtgcagaaaagcacgaagcttgcgccggggagcgttttgtgcgtggagatccccgaagcgcgcccgctcgacgtgaaggcggagaacattccgcttgacatcgtatatgaagatgacgacctacttgtggtgaacaagccgaagggtatggtggtgcacccggcagcgggcaattatgacggcacacttgtgaacgcgctgctgtatcactgcggcgattcgctttcgggcatcaacggcgtgattcgcccgggcattgtgcaccgcattgacaaggacacgagcgggctgctcatcgtcgcgaagaacgacaccgcgcaccggcacttggcggagcagatcaaggcgcacagctttacgcgcgaataccgcgccgtggtgtacgggaaaattcgcgaggacggcacggtggatgcgcccatcgcacgtcatccgcaggacagaaagcgcatggcggtacaaaacacgccgaacgcgagaaacgccgtgacgcactattttgtcacaaaaaattttacgggatttacgcagctgcgcctgcgccttgagaccggacgcacgcaccagatccgtgtgcacatggcgtatatcgggcatcctgtcgcgggcgacccggtctacggaccgaaaaaagtcatcacgcagctgcatgggcagtgcctgcacgcggggctcatcgggttcatccacccgcgcacgggcgaatatatggagtttgaagcgccgctgccgccatattttacggattttgtgaagacgctgcacgcggaggacgagtaagggggagagcttgtgcgcgcgggaagtcaacggacaattttactgttcgcgctgtttttaatggcgtgtgcggcggtgctgttctgcgtttcctttgagaatacaccgcttgaaccgtacagggtgacatcgacagggcaaagcgaagcagcatcgagcgcgccggctgcatccgctttaagcgaagaaaaagtcaacatcaacaccgcgtcgaaggaagagttgattggtctgaacggcatcggagaagtactcgccgacagaatcatcgaataccgcgaagcaaacggtggatacaaagatgtgcgcgagctcacgaatgtaaaaggcatcggcgaaaagctgcttgagaaactgctgccgtatgtgacggtgtaaacaaaaaaggcatacgttcctgaaaacggagcgtatgccttttgctatacttttttacttatttcaaaacgaccttatggaagacctttttgccttttttgatgatgacatggcctttttcaaagtcggctgcggtgcaggtcttggcgatatcggtgatctttacgtcgtcgacggaaacaccgccctgctgcacgaggcggcggccctcgcccttagatgcgatgaggccggccttctgcatgaggtcgagaatgttgattgcgccgtcggtgaggtcggctacggtgatctcggtggttggcatgttctcggagtttgcgccgctgccgaacagtgcgcgtgcggcttcctgtgccttccgggcttcctcagcgccatgtaccatctgggtgagctcgaacgcgaggatctcctttgcgcggttcagctggctgccttcccagctttccatcttttcaatctcgtcaagcggcaggaacgtcagcatcttgatgcacttcaaaacgtcgctgtcgtctacgtttctccagtactggtagaaatcgaacggggaggttttgttcgggtcaagccacacggcgttgccggcggttttgcccatcttcttgccctgagaatcggtgagcagggtgatggtcatggctgcggcgtctttgccgagctttctgcggatgagctccgtgccgccgagcatgttgctccactggtcgtcgccgccgaactgtaaattgcagccgtacttctggaacaaggcgtagaagtcgtagctttgcatgatcatgtagttgaactcaaggaaggagagacccttttccatgcgctgcttatagcactcggcgcgcagcatgttgttgacagagaagcatgcgcccacttcacgcaagagctcgacgtaattgagctttaagagccaatcggcattgttgaccatgagagccttgccatcggagaaatcgatgaagttttccatctggcgcttgaagcaggcggcgttgtgctcgatgtcttccatcgtgagcatcttgcgcatgtcggtgcggccgctcgggtcgccgatcatcgtggtgccgccgccgatgagggcaatcggcttgttgcccgccatctgcaggcgcttcattaaggtcagcgccatgaagtgaccggccgtaaggctgtctgcggtgcagtcaaagccgatgtagaacgtggcttcgccgttgttgataaggttgcggatgcgctcttcgtccgtgacctgtgcaatgaggccgcgggcctgcaattcttcgtaaatacccatgttgtttcgttcctttcaattttcaggttttgggcttttggggcaataaaaaacccccttgatcttcaaggaggggaattttgaatataaaaaacgccctcacttgatctatgagggcgaacacgtttcgttttgtggttcgcggtaccacctcagtttatttcaggctcacacctgaaacctcaacgggtacaaacatacccttgcgctgtaacgtgcgcacacggacttttttactgggaacccgttcaaaaagacagctccggaatgtatttcggcgttttttcgcacctgcttacaccacccgcaggctctctgtgccgatgaaaacgcgtacttctttctttcacagccattgtgcttattatagtcggcgcttttcggtttgtcaagcaccgtttttgattttttctacggcggctaaaagctgcgcctttttttcttcgctcgtcacccagcgcaggagcattttggtcgtgaggttttcggggagatcaagtgctttcaaaacgccttggcgcagtgtggcgctgtttacaccgccggtgagaccgagagacatgaggtctgccggggtcaggggttgaaaatcggttgtgctgccctcaacggaagcgccggcttcttttaaaattcccagtaaaatttccgaggaaatgccctccacgccgagcttgccctctttggaaggcgccgctttgcgcttttctttgccgtaaatatccgggatatacgcgtggcgaatttgatttgacggcacgaaagacgtgatatacgcgcggatctgccgaccagcgttgtcactgtccgtcaaaatgacgatgccgcgctctttggcgagcttgcggatgaaatcgcgcttttcagcatccttgtagatgccaaagccgttcgttgtgacgatgatggcgtcggtcatcgcggaaagcttgcttttgtcataccggccctcgacgatgagggcttcgttcatgtggatcataagagctcctttaggccacgctgccgcggtgcgcgacgtacaaaagctgggcgaaaagcttttcgagtgcgattctgtccatgttttcaccacccgaaagcttgatggaaagatcgcagttgagtaaaagcgaaaggcattcacgcagcatttcgatggaaaggtcgcgcacgtcgcgctcggcatattttaatctaaaatcgcggccgcggtaatcgccgtattccgccggcgccatggacgttttaccggattcgatcgcggcgcgcacgcgatacatgtcgatgtacgcactgcttaaaacggccaaaatcgtgtacggttcttcgcgctgggccatcagtagatcaagcagcgcatacgctttgctgtaatcgccgcgcacgagggcattgctcaagagaaacacggttgtttccatgtttttcgtgaccgttttttctacctgctcggcggtgatctcgccgccgcccgcaaaggcgcagagctttgtcacttcgtttgtgagggcgtttaagtcgttgccgacgtactgcacgatgcgctcggcaagcttgcgggagagcaggcagtttgccttttcggcctcgcggcagacgtatttttcaagctcgttgtctttcaggcgcagcgagggcaaggaaaagccgcgcgtgtcgagcttctttaaaaacgtgcgccactttgcgctctttttcgggtcgatctcgagcgtgggcagataaagaataagcacggtcgtttcaggaatagtatcgagcaattcgtagagcttatcgagctccgcggtgttcatggcttccacgttgaggtcggagaccgtgacgcacttgcgctctgccataaacggcatggcgacaacggcgtccgcaatgctgtctacgggcgcgtcgtgcgggaattcctgaaagttgaattccgggaaattgccgtccagtttttttaacaggcgatttaaattgcggcgcacgagcagcttttcgtcgccgtacaaaaagtaaaggctgccgatttgctcttttgcaatctgctccttgagtttggtttccgtgatctcgggcatagtgttttcctttcgttgcggcttagccgccgtataccgtgtacgtgccgcgctcgtcaaaatcgagccggatgctttcgtgctccgtcataaagaggtatgcgccgggcgaaagcgaagcttcggtatcctctattataccatttgtttttaaaatcgtaaacggggcagagaccgcactttgcggtttttctgtcaccaaaatatctgtgtcgtgggaaagtgacgtgctgcgtttcgtttcaaggtaaatttccgtgccgtttacggtgaacgtgacggtctcgccgccgtccgtgaccgtgaagctgccggagggaagcacgccgacataactgaaatcgtaaaacgcagcgttttccgcaggataatatacggtgtccggcacgagaatctgtttgatctcgaaaagctgtgcaagcttttcggcgcagcggatgcttttttcatcaggctgcacgtgtaaaagggtgatctgctccgcaccgttcgcgcgcagggcggtctcaacggaagcggcatttccgctgcacccgagcacctcggtggaggtgtttgtgataatcgccgtgcaggcggcgtaatcggtgcggaaaacgacaaggcgtgcggcgctttggttcaaaagcgcgtttgcacccatgccgcaaagcaggatgcacaccgctaaaacgcatggcagcgctttatttttgcggcggtagagaagcatggaaagcgtgaagaaaaggacgcagatcacgacggttacgggcagatatttgccggagatacgcagcgtaccgggaatgtgctctgcgataagcgtgatgatgaaattctgcgctttcacacaaatgccgcttaaaaacacgaacggcgcggcgcacggggagaggacggggacggcgagcagcaaggcggcgatgagcccgaaccgcagcagccacgcggaaatctccaacaccaaaagcgatgtgagcaccgaaacgaattgcaccgtgccgtataaataaagctgcagcggcgcagtgaaaagcaccgccgaaagcgagacggaaaatgcagaaacaagctttgcaaggtgcgctttccgctgcggcttgcgaatatttttcgtgactgcttttgtgaagcggggcgcaagcaggatgatgccgagcgtcgccgaaaacgagaacaacagggagacatcgcccgcgcagaacgggtttaataagctcatggtcaaaacggcaaccgcaagggagttgagcggttccgcttggcgaccgagaagaatgccgaaaagcaaaatgagctgcataatgccgctgcgcaccacagaggccgaaagccccgagacgaacataaaaagcagcgtaaacaccgcggaaacgagtgcggctgggcggcgtttcagcccgagcagacccagaaaaccgagggtgaactgcgttaagatcgccatgtgcatgccggatatggccaaaatgtgcgaagcaccggcctttttgtaggcggagacaagctcggtttccatatcgtcccgcaggccgagcagcatggcggaaagcacagagccttcggttttggggtagttttccaaaatcaaattgtgaaaatgcgtgcggatttggtttacataatatgaaaacgggtgcttttcggcaggcgtgacctgcacggattcgtaatccgtgacataggcggataagaccatgttatccgcaagccacgaggtgcgcggggagagcccgaggctgtcttcaaacgcgaagaacttcgcttcgcacgtgaccgtgtcgccgatctctgccgggaaagcctcgctgtgggagaggcgcaccgaaaaatcgacatcctgtacaggctcgtcgatgtgcgtcacatgcagcttataatagaaccgcccgttgcttttcgtgaggaacgactctacgtttccggtaacggtatatgtgccgccgtcatagcgctccgtgggcagcacgaatagatgcattgcaactgcaaacaccgcgaatgcggctgcggtagcgatgagggaaagcacgaaattcggccgttgtcgatgctgcttaaacagaaaaagcagaaaaacggcggcgaacagcaaaaccgccgaaacggcggcaaacggcgcgccgaagaaagaggcgacaaacagcgccgcgaaaaaggggaagccgatgtgcacggccgggcggtcgatgtcggggttctccataaaagctccttacagcaaaattcttacgatatcttcgtagcttgcggcttcaaagttgggcggtatgggaagggtgtttgctttgcgattagggttataccataagctgtctaaaccggcgttctgcgcgcctttgatgtctgccgaaagcgaatcgccgatgacgagacagttttcggtgctcgcgcccggtatgtgcgcaaggacataatcaaaatattttttatccggctttgccgcgccgatctcatcggaaataaagcagcccttcataaaggccgtgacgccggaattcttgaggcgaccgggctgcgagatcggatttccgtttgtggtgatgtagaggccgtaacgctctgaaagcgcacgtagcatatttaaagcgcccggcagcggcgtgccggttttcgctatgccggagacatacaggtcttgcaaaaaatcgatgctgaccggtgtgagccccgcgacctcgaagaaatcgacgaaacggttgcgatacagctccgctttggtgcagagcttttgctcaaaacgccgccaccaactttcgttgcagtcgttataaaggcgcagaatctctgcgctgtatggcttttgctttgcaagccccgattgctcgtacatatattgaaatgcgagcggcatgtctttttcaaaatcgatgagcgtctgatcggcatcaaacagcagatttttatattttgtgttcattaaagtctccctcaaagcaaaaaaatccgatagaaaaggacggtgtgcagcacgatgaaaacgggcatggagaccacaaatttcaggtgttttgttttgtggcggatacacagcatggcgataaattcgccgagtgcgccgcctgccgcaccgagcaaaaggagcgtgcgctccgggacacgccactgctttttctgtgcgcggcgcttatcggtaacggtcaggactgcggctgtgatattgatgatacaataatagatcagcagtgtgaactgcacgggttccagtttaaaatccatcatattttcctcgcttgtctcatacttatgattatcttaccgcaaatccgtttggcggtcaagggaacgcagagagaaaggaaaaagcgtatgatcgtaattaaaaagtatcattatgtcatcgcggttttaattttggttgcggccgtatttctggcgatgaaaagcgcggcgggacgggagaaaaacgcagagtcgagtgcggcggaaaactccgttgaagttgtattctcaagcactgcgccggagcaggaggatagcaacgccgcagaaacgaacgcaaaagcagaagaaccgcttgtcggcgtgtggattccgtacatggcgctcgatgtgacggagaagaccgaagaagcgttcaaggagaattttgatgccaagcttgcggctgcgaaaagcgtcggcacaaatgcggtgttcgtgcatgtgcggccgtttgcggacagcctgtatccctcggagtacgagtcgtggtcgcaccttttgaccgatatgcaggggaaagaccccggctacgacccgatggaatacatggtaaacgccgcgcacgagcaaaatatgcagtttcacgcgtggatcaacccgctgcgcattgcgagcacgacaatcccgccggagcttgacgaaaatggattttatatgcaaaattatgtaaatcacccggaatattttatggcgtacaatagcggcatttattataaccccgcaagcgcgtatatccgcaaccgcattgcggacggcgcagcggagatcgccgaaaaatacgacgtggacggcattcattttgacgactatttttaccccacggacgacgaaagcatcgacgccgagcagtacgcggcgtatgtaaatgaaactgaagagccgctcacgctgcacgagtggcgcaccgcgaacgtgaacgcgctcatcgccgccgtgtacagccgtgtgaaggaagcgaatgaaaatgtgcagttcggcatttcgccgcagggcaatttagaaaacaacgagatgatcaatgctgacgtgtacacgtggtgtgcgcaggcggggtatatcgattacgtttgccctcagctttattacagctttgaaaatgaagcgctgccgtttgaaacggcgctccagaattggtgcgcattaaagcgcctgccgagcatcaaattatatatcgggcttgcggtgtacaaggcgggcacggatgcggacaacggcacatggctcaacacgaccgacacgctcgcaaagcagatcggccgcgcaaaggaagcgggtgcagacggcgtggtgctgtacgccgtagaccacctgacaggcgaaaacgccaaagccgaaatggcgaacgccgtaccggagctggaaaggtttaaagaagcacaacagaattgacaaattatataaaatattccacagattaagagaaaatattgcgccttgtcatcacttttgatatactgaagctgcggctgatgtatgaaaagcggtgcagaatgtgtccgtcccgcattttgcgcccgaaacgattttgtttgataaggacaggagaaccaacatgacggaagaaaacagaaatgcgctgatgcagcgcaacgaccgattgattcgggacgtgattcaaaaagcagaaaaagaatgcaaaagcgccgtcgcgttaattgcaatgtacggctcgttttgcacgggtcgatactcggaaacgtccgacctcgacctgtttgttttaatgcggaacgaggacggctataaagcctgtgtaacctttatactcgacggcatcggcatggatttttacggcgtgaaatgggaatggctcgaagaagaagcaaattacaccacaccgtatcttgcaaagctgctcgattcaaaaatcgtctattgcccggaaaatgcggacagggaacggtttgaggcgctgcgtgaaaaggcgaaaagcatcctcacagcgccgtatacggaagacgacctgcaccgcgcggaggcgatgttcggcgaagcggagcgcttatttgcgaagctgatgcgcgaaagaacgttcgcgcaaagccgcaaatatgccgcgggcctgctgaattgcctgtttggtacgatctgtgtgctgaataagcaagtgtttaaattaagcgtgcgcgaccgctttacggagcttgagcagatgcggttcatgccgcgaaatttcaaggccgtaacggaagaggtcatccgcgcgggcacggtgaaagacctgcgcacggcggcggaaaagctgatgcgtgctgcggatgactgctttgcagaagcgcgagcaatatatgcgccgaaagcagagaagaaggaaccgaccccggacgatctcaagggcacgctggaagagatggtgagcaactggcagcacaaaatacaccgtgcggtggaagaaaaagacgtgttttccgcgtttgacgcgacggcgaatttgcagtatatactcgacgagatcggtgagaacctcgacattcccgcatttgacctgctcgaaaagttcgacgcggaagacctgtcggcggctgcggcgcagtttgacggcgcactcagcttatatgcaaaggaatacgaaaaagcagggctcaaaccgaatgtgtttgacagcatagaggcgtttgaaaaaatgtacctcggttgaggtggatttcaaaaggagaaggaaaatgaaacgggcaatacgggttttgacggttatattggtcgtattggaagcggtcttgccatgcggaaaatggggcttgcagctaatcggttacacacttgagccgttcagctatgtcggttacgcgtggcttttggcggtcatatctgccgttgtgctgtttctgcggctctttaaaaaggacgaatcggacggcgtactgtgtgttttcctgatgccgttgtctttgctcgacgcgctcgcgcacacttcgttcttccgtacatcttcgctccatccgcagaaaagcgcatggacggcgatagcgcttttgatctgcgtgctgtgtagcgcgtcgatcaccgttgtgtacggcaagccgaagatcggtagaattctggtcgagatcatctcggttttgctcgtgctgctgatcgggcttgtcggatttgtctccctgttttcggcaagaacagtcgggcagagcgtttcatcgccggagggaacgcggcgggcggagatcatcaacgtggatcaaggtgcgctcggcggagcgacgtttgtggaggtgtatgagaacagcgggcttaatttattgctctttacggtcgcacctaagtcaaagcgcgtgtatgagggcggctgggcggatacttttgatatgcagctcacttggaaagacgaagagcatctcgttattacaaagcggtttgattatgtttcgggggaagagttcacggacatcgagatcaatttgaatacggtcgagtgagaccgcagcttcagccgggtgcatcgaaaagtgttgcgcccggtttttttgtgcgcgcgtaaactgaattttttgtgaaaaagccgtctttggctttaaaattgaaaaaagctgtgctataatacgaatacgaaagcatatttatgcaactataccttttgaaaattcggttttaaactatttcaggaaggaaaatttcagagatgaataatcatttttttgaacagaaggactgcggcttgcaggcgttctggagcagcacgccgcagtttaaaacggcacgcgtttccgcacaccttgtgttgccgcttaccacgccggaaaatgcggctttatatgcactcgtcccgaatatgatctcccgtgcgacgcgcgaataccccgattacacgcagtttggcaagcgccttgcggagctgtacggcgcttcggtgcagccgggcgtaacgcgcgtgggcgataaccagattttaacgcttgccgcagccggcattgcgaacccgtatgcgttcggcggcgaagatgtgcagcaggcgctttccgaaatgttggagagcattctgttcacgccgctgtgcgacgaaaacggcctgttcccggaggacggttttttgcaggagcagcgccagcttttggagacgcttgatgcggaatataacgataaggcgacgtatgccatgcagcgctgtgtgcagaccatgtttgcgggcgaacccgcaggtgtgccgcgcatcggtacgcgcgaggcgatcttgaatgcgacccgcgagggcgtgaaagcggcgtgggagtatgccgtaaagcacgcgcagatctgccagttcacaatcggcgacggtgcggacgaccgctttgcgcagcagcttataaagcgcctcggcatgcgcgacgcggtgtccattgaaacaaagcgccacacagcatcgggagacgtaaagcgtgtgacggaagaaatgcccgttgtgcagtctaagctcgtcatgggctttgccatcggcaccacgccggaagagcgccttgcggcaaagctgatgtccgttgtgctcggcggcacaccgagcagcaagctctttatgaacgtgcgcgaaaagcagagcctttgctactactgcgccgcgcgccacgatacgccgaagaacgtcatgttcgtgcagagcggcgtggagaccaaagacctcgaccgcacggaagaagcgattttaaaagagctcaacgatatgaaaaagggtaatatcacggatgatgagattctctttgcaaagctcgccatgtgcaacagctacaacgccgtggcagattccgcggcatctatggagacatggtatctcagcggcatgctgcagggcaagctccacacgccggaggaatatgcggagcgtatcatgaacatcacgaaggacgagatcatcagcgccgccgagcgtgtcacgctcgatacggtctataagctgaaaggagcggcaaaatgagcgcagaaatgatgaatacccttgtggaaagcaaacttcttcgggacggctaccgttgcgtcaaacacgcaagcggcctgaccgtgtttatatacccgaaagcggaaatgcgcagtacgtatgcggtgtttggcacgcgctacggctccatcgataaggtctttaaacgcagcgacgaggcgaaggcagagacgacacccgcgggcatcgcgcattttttggagcacaagctttttgaaagcgaagacggcgacgcattcggccgctatgccgagatcggcgcttccgcaaacgcgtatacgtcgtttgagacgacgcgctacctgttctcctgcacggaaaacgcagagcaggcgctggagattttgctcgacttcgtgcagtccccgtattttacaaagcagaccgttgaaaaagagctcggcatcatcggccaggaaatcaaaatgtatgacgatgacccgcagtggcgcatgatgttcagcctgctgcgcgccatgtaccacacgcatccgatcaaggacgacattgcgggcacggtggagagcattgcggaaatcaccccggagtacctttaccgctgctacaacacgttctataacctcaacaacatggcactgtgcgtctgcggcaactgtacggaggaggaagtcctcgcgctgtgcgacaaaatgctgaaaaagagcgagcccgttgaggtggaacgcgtttttgaagaggagcccgataccatcgtgcagccgctcgtcgaagaaaagctgcctgtggcgtgccctatgttccagttcggcgtgaaagaggccgtaaccggtgcgcaccgcacggaaaaagaccttgccgtcaccgaggtgctgctcgacattatggcgtccgacagctcgccgatgttccgcaaactcttagatgcgggccttgtgaacgaagcttccttcagctacgagtattttgagggcacgggctacggtgcgctgctgttcggcggcgaatccggcaacccggaggccgtgtgtgatgccatccgcgaggaaatggcacgtttaaagcgcgaaggtgtcaaggaggaagacgtgcgccgcagcgcgaaatccctttacggcgcaaatgtttccggcctcaatagcccggatgtcatcgcgaacgccgtgatgaccatgcactttaacgaccgcgagctgttccgctacatcgagtgcttctccgagatcaccgcggaagacgtgaacgcgcgcgttcagacgctgtttgatatggacaaaacggcagcttccatcattcgtccgttggacgaagcttaatcgaaaggatatacagtcatgacgcatcaagttcagttcccgaatctcggaatttcggtggaggtcaatcccatcgcgtttcaagtcggtaatttcactatttactggtatggcatcatcatcggcatcggtttcctgctggcggtgctgtacggtttttcctcctgcaaaaaaatgaatatcaataaagaccacctgctcgatgccatcatcgccggcttgctcggcggcatcatcggcgcgcgtctttactacgtcatcttctacccgggcgacaagtacatcacgaacccgatggaaattttcaacatcaaagagggcggcctcggcatttacggcggcatcatcggcggcatgctgtgcggcggcatcgtcgcgaagatccgcaagatgaacctgttcgccgtgctggatgtcgcgtctcttggctatctcatcggtcagggtgtcggccgctggggtaactttgtgaaccaagaagctttcggctgcgcgaccgacctgccgtggggcatgtacagtgaccgtaccgccgcagaagtggtaggcaatgtgcacccgtgttttctttacgaatcgattttgtgccttttaggctttgttttactgcatttattcacgcgccacctgcgccggtatgacggccagacgttcttattatacatcatttggtacggcgtgacgcgcttcttcattgaaggtctgcgcacagacagtctgctgttgccgggtatcgatctgcgcgtttcgcaggtgcttgctgcggcttctgcactcgtcgctgttgttttgctcatcgtgttccgcaactgccataagcttacgggctgcggcagccgcaaggcgatggaagctgccggtctgacagttgaagacaaggcggagaaggtcgagattgacgacactgccgaaagcaccattttctccggcatgagcgccgaagaagcacaggagcacatgacggtcggcaccggcgtaaagaaagctgccgaggcggaaaatgaaaaaacggaaggaaatgcggatgcaaacacttccgaagagccgtctgatgaagccgaagaagcgaatgaaacggcagaaggggaaagcgaggagaagaacgatggcagtgagaattgacggcaaggccgttgcggcaaaggtacgcggcgaaattgccgaagaagttgccgctttaaaaaagcagggcgttcagaccggcatggcggtcgtgcttgtcggcgaagaccccgcgtctaaaatctacgtgcgcaacaaaggcaaggcctgcgccgagaccggcatttactccgaggaacacgtcctgccggaaaacaccacgcagggggagcttttggcgcttatcgaaaagctgaatgcagacccgaagatcaacggcattttggtgcagtctccgctgccgaagcacttgaacgaagcgctcatcgtggagcatatcgacccgaaaaaggacgtggacgcgttccacgccgaaaacgtcggccgcatcatgatcggcgatttcgcgtttttgccgtgtacgcccgcgggcatcatcgagctcatccgctctaccggcgtcacaatcgacggcaaaaactgcgtcgttatcggccgcagcaacatcgtcggcaagccgatggctatgctgcttctgcatgaaaacggcacggtgacgatctgccacagtcacacgaaaaatttgaaagagatctgcaaaacggcggatattctcgttgtcgcggtcggcaaggcgaaatttgtcaccggcgatatggtaaagcccggtgccgtggtgattgatgtcggtatgaaccgcgatgaaaacggcaagctgtgcggcgatgttgattacgaaagcgccgaggcggtcgccggttaccttacgccggtgcccggcggcgtaggccccatgaccattacaatgctgatgaaaaacgccgtaacggcagcaaaaatacagaacgggctggtgtaagtatgagcagattgctcagtaaaatcaaggccccgaacgatgtaaaaaagcttgcggcaaacgagctgccggagctttgcgatgagatcagggaagagatcatcagcacggtggcggacaacggcggacacctcgcttccaatttgggcgtggtggagctcaccgtggcgctgcaccgtgtgttcaccttgccggaggattgcatcgtgtgggatgtggggcaccagtcctacgcgcacaagcttttaaccggcagagaagaagcgttttccacgctgcgccgcgaggacgggctttcgggctttccgtcgagagaagaaagcgactgcgacccgtttacaacggggcacagcagcgcgtccatttcttcggcgctcggtctttccgttgcaaaggcacttgcgggtgatcccggccatgtcatcgccgtcatcggcgacggcgcgttgaccggcggccttgcgtatgagggcctcaacaatgcgggccgcatcaaccgcaatatgatcgtcattttgaatgacaacgccatgtccatttcccgcaacgtgggctccattgcgcgttatctttcctatgtgcgcgcaaagccggggtatttgaacgcaaaagacagcgtcgaagccgcactgtgccgcgtgccgaaggtgggcgagcacatggctgccgaagtgcgccgcgtgaaaaaccaaatcaaaaagaatattttcaacaccacgatctttcaggatcttggctttaattattacggcccgttcgacggacacgacctgcgcaccttgacgtcggttttgacgatggcgcgcgatatggataagccggtgctcatccacatccgcacctataaaggacgcggatataaatacgcggagaacgctccgagcgtttaccacggccttgcagcgtttgaccgcgaaaaaggcgcgggcgaagccattgccaagggtttttcgcatgcgttcggcgagacgatgtgcacgatagccggtgtaaatgagaagctgtgcgccgttacggcggcgatggaatccggcaccggtctgacggatttccgcgaaaaataccgcagccgtttctttgatgtcggcattgcggaggaacacgccgtcacgttctgcgccggtctggcgcgcggcggcatgattccggtttttgcggtgtattccacgtttttacagcgcgcgtacgaccagctcatccacgacggcgccttgcagcatctcaaaattattctggccgtggacagagccggcgtggtcggcgaagacggccagacgcaccaaggtgtgttcgatgccgcgttcctgcgcaccgtgccggacatccacgtgtacgcgccgacgtattacgatgagctttcggacaatcttgatgactgtattaagggagaaaaccacctttatgctattcgctacccgcgcggcaaagagctgtatcgcccggaaaactacacgctttccggcaagccgttttatgtgtttggtacggaagatgcttctgtcacgattgtgacctacggccgtatgttctcgtttgcgtgcgaagcggcggaaacgctcgaaaaagagggcataaagtgccgcatcgtgaagctcaatcgcatcgtgccgatcgatccgaaagcggtggaagcggtcttaaggtgtctcacggtgctgttctttgaagagggcgtccgccaaggcggcattgcggaggaattcggcgccatgctgttggatcgcaatttcagaggacactacgaagtgcacgctattgaaaacggattcatcaagcacgcgcctatgttccgcacgctgcataagctcggtcttgacgtagagggcatggtgaacgccgtacacacggcgctgcaaaccgcagaaaagaaagatggaaaggcagtttctatatgaaaaaaaggatagacgtcctgctttatgaaaaagggcttgcgcccagccgcgaaaaagcgcgcacgctcatcatggcgggctgtgtttacgcggataaccagaaattcgataagcccggtgacaccgtgcgcgaagacgcagtcttagaggtgcgcggcaacacgctgcgctacgtcagccgcggcggcttaaagcttgaaaaagctatgcagctgtttccgatcaagctcgaaaacaccgtatgtatggacatcggcgcatctacgggcggctttacggactgcatgctgcaaaacggcgcctccaaagtatacagcgtagacgttggctacgggcagctcgcctggcagctgcgcaccgacccgcgcgtggtgaatctggagcgtacgaacgcccgctatctcacacgcgagcaaattccggaggagattgacttcttctccgtagacgtgtcgttcatctcgctcaaaattattttgcccgccgtgcgtccgcttttaaaggacggcggcaaagctgtgtgccttattaagccgcagtttgaagccggcagggaaaaagtaggcaaaaagggcgttgtgcgcgacaaagccgtgcacgaggaagtggtgcagatgctctgcgattttgcagtggaaaacggatattccgtactgggacttacgttctcgccggtcaaaggaccggagggcaacatcgagtatcttgtgttcctccaaaaaagcgacgcgccggtgaatacggcagaaagcacgccgcatgagatcgtggaagcatctcacgcggcgctggacaaaaaggactgaggcttatgaaaattgcggtgattccaaatctggataaacgcgatgcggacacatacacccgggaaattctggcggttttgcaggaaaacggtgcggaaacactcatgcacgaaaagcaccgcgggcagtatgaacacgtcacgttctgcaaaaatcacgccgcactggcggaaagctgcgaccttatcgttgcggtcggcggcgacggcaccatcatccacacggcaaagcacgcgtccgttgcaggtaagcccatccttggagtgaaccttgggcggctgggctttttggcaggtgtggagaaggacgagctgcacaaattaaaggcgctctttacgggcgattaccgtgtgcgccgcctgatgatgctttccgttaccgtgcacagcgtgaagggggatacaacctaccgcgctttaaacgacgcggtcgtctccggtgcacagtccagaatttacgatttcggcttttccgtcgacggttccaagctttataaattccgcgcggacggcctcattttggctacaccggcgggctccacggcatactcgctctcggcgggcggcccagtggtagacccggaatcggaatgcgtaatcttcacgcccatctgcccgcatgcgctctttaaccgcagcacgctgttctgcgcagataagaccatcacggtcagcacggacagcgattattccggcgaggtgtatctcaccatagacggtggcgcacccatacgcattcataagacggacacggtttccgtcagtcgctcgacctattacactgagcttattcagaccgacgaacgcaatttttatgatattgtagacagcaaatttatgcaaagcagaaattaaaaggcaggaaggaaggcagaaagcatgaaaacaagacgccacgccaaaattctggagctcatcaaagcacaggatatcgacacgcaggaggagctcctgcgcaatttgcgcgcttgtggcttcgacgtgacccaggcaaccgtttcccgcgatatcaaagagcttcggctcgtaaagagtctttccccgaacggaaagtataaatattccaccgggcgcgacaatgcccgcgacatttcctccaagttctattcgctgttcggcgattcggttatgagcgtggaggcggccggcaacatgatcgttgtcaagtgcatgaccggcatggcgcaggcggtctgcgcctctatggatacgctgcatttcccggatttcatcggcacgctggccggtgaagacaccattctcatcatctgcaaaacggatgagattgcggaggaaaagcagaacgagctcagaaagctgattggcggggtctgatatgctgacgcagctttacattcagaatatcgccgtcatcgagcaggcgtccatcgattttgaaccgggcttcaccgttttgaccggtgagaccggcgcgggcaaatccatcatcatcgacgcgatctacgccgtgctcggtgagcgcacctcaaaggagcttgtgcgcacaggtgcggagcaggcgagtgtttcggcactttttacggatgtttctccgcagacgcagcaggttttgcgtgagctggatattccgcttgaagacgatggcagtttgcttattcgccgtgagatccgcccgcacggtcgctcctcctgcaagctcaacaacatcccggcgaccgtttccatgctgcgcgccgtcggcggcacgctcatcgatattcttggtcagcatgaaagctacaagttgctttcaccggaagtgcacggcacgtatatcgacagctttgcgggcgcatacggtctgcttgcggagtaccgcgcggcgtatacggcgctgcgccgcatcaaaggcgagctcgatgcgctcgaatccgacgaggggcagaagtcccgccgcatggatattttgcgctatcagatcgaagaattagaagctgcacagctgcgcgtcggcgaacaggcagagctgaccgagcgccgcgatgagatccgcaacagtgagcgtatcgtgcgcggtgtgggcgaagctgtcacgcttttgcagggcgatgaggacaatggcggcgccatcacggccgtgtccgttgcggcagagtcgctcgagcaggcggcgcgctatgcaccgtcgctttcaaacgtcgccgagcatgtccgcgacgccgaatacgcactgacagatgccgcggcggaaatctccgattacctcgataacgccatgttcgacgcaaacgagcttgatgagattgaaagccgtctggaagttatctaccgcttgagcctcaaatacggcgaaacagaggaagaaatgctttcgttcctcgaccgtgcccgtgcggagctttcggacatcgagttttccgatgaaaaaaaagaattgcttttgcagcagtatgagcagaagaaaaaagaagcggtgacgcttgcaaagcagctatccgcgaagcgccgcgccgcgtgtgagagcttttcccgccgtgtgcggcaggagctttcagagctcaacatgcccggcgtcgtcttcaccgtggagcaggagcgcacaccgttgacagccttcggctgcgaccgcatccagttcctcgtctccgcaaacgcaggtgaggacccgaagcccatgtcgaaaattgcgtccggcggcgagctttcgcgtattatgctcgccatcaacaccgtgctgtctgaggattccggcgcggccgaaacgcagattttcgatgagattgacaccggtatcagcggcgaagcggcgaataaggtcggcatcaagctgcgctgcgtctccaaaaacgcgcaggtcatctgcgtcacgcacctggcgcagattgccgccatggcggataaccacctgtttatcgtcaaaaagcaggagaacaacaaaacgtacacggcggtgcacacgctgacgaaagacgcgcgtgtccgcgagattgcccgtattatcggcggcgatgacatcacgccgttaaaactcaaaatggccgaggagatgctcagtcagccgcatgaatcatgaatgttaatcctgtaaagataaatagcctcacaattaaaataagtaaagctatatcacttgtcagcgcactcgtgacaatttacatcctgcttttgctttcgccgattctgttcggacagaacgtatttgctgtaaagcaagccgactgtacaggctatcccgtgaattcgcttgcatattacgcatatatgccggccgaagattatttcccgggtgactgcgcggcgattcaaaccgaacgcggtctattgctgctgacgctgaccgaaaacgaccctgaagcccgcgtttggcatacggcgggggactttaaagtctatgccgaggtgccgtatgaatatttagagggcaaagtgagcgcattctgcctgccgcatatgggtttcgtcgcggatgattggcccgttctgttgcctatatttgcagggggcgcggcgcttttctatgcattctcgcgcgttctgacgaaaaaactatatcagccaaagtacggcagaaagccgggggaggaggccgaaaatggagctgacacctgaatacataaaggctgttcgctttacagttaagcgcggcaacacctacgatgccgccgaggtggatgcgttcttagacgagcttttagaagctgttaccgcactgcaaaactgtccggatgccgatacccttgcggcggtgtgtaccatacgcgccgagatgacggaacagatcacccgcgcagtactcgaagccgaaaagcgcattgcacccctgctttcggacgaaaatgcgatttagccgccgattttttcggattttacgctgtttttgtgcacaagtatttgacaagagagcgggatatgttataatataatcgaaatagtgttatgccctttcaaatatgtccgtaggagaacgcaatgaacatcgcacatctgaaatatgcggtggaagtagagaagaccgcatccatcactaaggctgccgaaaacctttttatggggcagccgaacctcagccgcgggattaaggaacttgaggagacgctcggcgtcaagatctttaagcgcacctcaaagggcattgtgcccacaccgcagggagaggagtttctcggctacgccaagagtattctggcacagatcgaagaaatggagtcgctttataagcccgaaaagaataataagctgaagttcagcatctcggtgccgcgcgccagctatattgcggatgcgttttccaagtttgtccgtgaggcggatatgtcaaaggaaatcgagtttagtttcaaagaaacgaacgccatgcgtgccattcgcaacgtggtacaggaaaactacggccttgccatcgtgcggtatcagacgatctttgagagcttttttacgaacatgctgcgcgataagggcatgaagtcggagaacatctgggaattcgagtatcagcttctcatctccaaaaacgacccgctctcgcaaaaggatgttgtggatatcgaagacctttccggctatatcgaaatttgccacggcgatccgttcgtgccgtcgctgccgatgtccgacatcaaaaaggcagagatggacgaaaacgtcaccaaacgcgtgtatgtttacagccgcggcagtcagctcgaccttttggcgacggtgccgcacacatatatgtgggtctcgccgacggatgtggaacagcttgaacgctatgagcttgtgttaaaaccgtgccgcggcaacaaacaccgcgtgtacagagatattttgacgtccaagaaggaatataaatatacggcggtcgataaacagttcatcgaaaagttgtatgaggagcgcgatttattgagcgcaaagttcggcacgccgcatgcggagtagaaatccgccgaagtttgtatttgatttagtttgtctgttttttaacgtgtcgttggggcttttttgcttttatatcgatgaaattatatcgatatttgaaaatgggtattccatttggtcgtttcttgtgttaaagtattagatgtttggtttattttgattttctgtttggatgggggttggctgcgtcatggtgaatcgcagcatttcaaaacaaacgctgctcaggttaccgctttacctgaattatatgaagcagctcggcgaaaatacgccggaacacatttccgccacgaccatcgcagaggcgctgcgcctcaaccatgtcgttgtgcgcaaagaccttgcagcggtcagttcggccggcaagccgaaggttggttacaacacagaggcgctcatcgcagagcttgaggaattcttaggctacaatgatgttgatgacgccatcatcgtcggcgcgggcaagctcggcaaggcgcttttgacgtatggcggctttaaagactgcggcatgaacattgtggccgcgttcgatattgatgaagaggtatgtgaggaagattacagcggcaaacgcattctgacaatggataagctgatggatctgtgtgagcgcatgcgcgtgcgcatcggcatcatcgcagtcccggcagaaaatgcgcaggccatctgcaacttgctcattgaaagcggaattttggctatctggaatttcgcgcccgtgcatctcgatgtgccggagggcatattggtacataacgaaaacctcgccgcgtcgcttgcgctcttatctaagcagctcaaggagaaatttgacgccaatacctaagttagcttggcagaaaaggaagatcccttttctatgccattatataaacaaataagtaaaaaccaaaaactaagaaacggagtttgattagaatgaaagttatcatctgcatcggcagctcatgtcatctgaaaggttcccgccaggtcgtggaaaagcttcaggcgctcgtaaaggaaaaccacctcgaagataaggtagaactcggtggcactttttgcatgggtgactgcgtaaacggcgtcaacgtcaccgtagacggcgagaagcattccgtatctcccgataccaccgaggaattcttccagaaagagattctcgcaaaggttcagtaagcataagaaacaaaaaattagccggtgcaagagcttttttgcatcggctctccgtgcgtaagctgctgtgtgcggcaaaacgcagcagaaaataggaagtaagggtgattaagttgttgacagccggaatgaaaggcaaagccgagaccgttgttacagagaagaacacagccaaagccatgggaagcggcacgctggacgtttttgcaacgcccgctatggtcgcgctgatggaagaggcggcttggaagtgcgttgcgccggaattagagccgggcatgggcactgtgggcacgctgatgaatgtgcagcacacgtccgcaacgccgcttagcatgcatgttacggcagagtgcgaacttaccaaagtggacaaccgccgtttggtgttcacggttaaggcgtttgacgaggtcggccccatcggcagcggtacccatgaaagattcatcgtcaaggatgaaaagttcgtagcgaaagcgaacgctaaaagaggataagttaaagagaggataatagggtatgccagactacctgaagctcaaaaagtctaactgtcagaactgttataagtgcatccgtcattgccctgtcaagtccattcgttttcagtccagtcaggcgcatatcgtaaaagacgagtgcattctctgcggtcagtgctttgtcgtatgtccgcagaacgcaaaagaaatccgaaatgacgtaccgattgcggagatgttcgtcaagggtgaatgtcccgtggcagtcagccttgcgccatcctttgtagcaaattacccgggcgctaccatcgaaacgatgcgtgcggcgctcaaaaagcttggctttgaccgggtagaggagaccgccgtaggtgcgtccgtcgtcaagaccgaatacgaaaaaatcattaaagagcgtcggcagagcgtcatcatttccacatgctgccactctgtcaatacgcttgtgcagaagtattacccggaggctctgccgtaccttgcacatgttttgtcgccgatgcaggcgcactgtaagatgctgaaggaggaagacccggaactgaagaccgttttcatcgggccgtgcatctccaaaaaggcagaggccgacgaaagcccgtatgtagattgtgtgctcacgttcgaggagctttccgcttggtttgaaaaagagggcatcaccgtggaagcaggcgaggatcacacggaagaaagccgtgcgcgcctgttcccgacgaccggaggcattctgcgcaccatggtgtgcgatgacctcgagtatacatacatggcgatcgacggcgtggaaaactgcatcaacgcgcttgaagacatcaagagcggcaaaatggagaactgctttgtcgagatgagcgcctgctttggcagctgcatcaacggcccggctatggatcagggtcagcgccagcctgtgcaggattttatcgcggtcaataagtatgccggcaaaaaggactttgcggtgccgcagccggcttccgaagagctcaagcacgattttgattatatcagcctgtatcacctcatgccgggcaacatcgagattgaggctatcctcaaaaagatgggcaagactcgcccggagcaggaattgaactgcggtgcctgcggctataatacctgccgcgaaaaggccatcgccgtttatcagggcaaggcggagatttccatgtgcctgccgtatctgctcggcaaagcgcagtcgttctccgataccatcatcaacaacacgccgaacggcattttggtgctgaacgaatcgctggaaatccagcagatcaacgctgccgcgcgtaagatcgtgaacgtgaagcatacatccgaggtgctcggcaaacaggtcatccgcattctggacccgcgcgtcttcatcgacgtcatgcagtccggccgcggcgtgcgcgacgagcgtgtgtaccttgcggaatacggcaagtatgtcgaccagaccgtgctctacgaccgcaactatcacattatcatgtgcatcatgcgtgatgtgacggatgaaatgaacgaacacctgaaaaaagaaaaaatggggcagcagacgattgaagtcaccaaccgtgtgatcgaaaagcagatgcgcgtcgtacaggagatcgcatcgctgctcggcgagaccacggcagaaacgaaaatcgcgctcaccaagttaaaggaatcgctgcaagatgaataatctctgtacagatattggctggatgagcctcaacaaaaaaggtgaacagctttgcggcgatcacgttgacatcgttccgcagggagaaaattccacggtagttgtgctggcagacggcatgggcagcggcgttaaggcaaatattctttccacgctgaccgcaaagatcatctctaccatgatggcggaggggctgcatgtcgaagactgcgtggagaccattgcgtctacactgcccatctgcgcggtgcgcggcgtggcgtattccacgttcaccatcatccgaatcatagaaaatgaagaagcggagatcattcagtatgataacccgttcgtggttctgctgcgcaacggcaaaaactgggaatacccgcgcgaagccgtcgagatcggcggcaaaacgatctataagacccgcatcccgattcagaaggatgacacgttcatcgcgttcagcgacggcgccattcatgccggcatcggcatgtcgctgaatttcggctgggagcgcaaggacatcatcgactatatggagatgatgtacgacgaaagcttcacggcaaaaacgctcaatgcgctgctgctcgatgagtgcaacaagctttacggcggccagccgggcgacgataccaccgcggtctgcgtcaaagtgcgcgagcgctgctgcgtgaacctgatgatcggaccgccgtctaaacccgaagatctcgcgaaaatgcacgaggcgttcttctcggcacccggcaagcggattgtctgcggcggcaccacgtctacgcttgcggcggaatacctcaaaaagcccatcatcgcacagctcgattacctcgattccgatattccgcccacggcgaaggtcgaaggactcgatcttgtcaccgaaggcgtcatcaccatgagcaaggtcgtcgagtacgcgaaggattaccttgaggaaaaccgcaagtacagccagtggggctataagcgcgacggcgcgtccatgatcgcccgcatgctgtttgaagaagcgaccgatatcaacttctttgtcggtcgtgcggtaaacccggcgcaccagaacccaaatctgcccattaacttcaacatcaagatgcagttggtcgaaaatctctgcacctcgctcgagaagatgggcaaaaaagttaaggtatcctacttctaaacgcagaatagcttctgtgtatagagtgtctcggcactctaaggaagatttgaaaaatatagaaaaggaaatctctgtccaaagcaagaaaggtttgatgtgaagaatgagaaagtttgatacgaaaatccagtatttgaagtataaggtcctgcgcgaggtcgcacgttacggttttgaggataacctcgacgccgcatactatgagattccgaagctgatcgtcaaagaaaaaccgacgatgcgctgctgcatctacaaagagcgcgccatcgttgaggagcgcatcaagctcgctatgggcggcgacaagaaaaacccgaacgtcatcgaagtcatcgagattgcctgcgacgaatgcccggtcagcggccatgtcgtcacagagtcctgccgcggttgtcttgcacaccgctgcgaggacgtatgccgccgcggcgccatcacgtttgatgagcagcagaaggcgcacatcgataagtcgaagtgcgtagagtgcggacagtgcgcaaaggtatgcccgtacagcgccatcatcaaccagaagcgtccgtgcgaaaaggcctgcaagattaaggccatcagcatgagcagcgaggagcatcgcgcagcgcatattgataacgaaaagtgcatctcctgcggcgcctgtgtctaccagtgcccgttcggcgcaatcgtcgataagtccttcattctcgatgctgtcaacctcatcaagggcagccacgagaatcaggattacaaggtttacgcggtcgtagcaccgtctatctccagccagttcagctatgcaaagctcggccaggtcatcaccggcatccagcgcctcggcttctatcatgtcatcgaagcggcgctcggcgcagatatggttgcgtataaggaagcggcagagcttgcggaaaagggcttcctcacaagttcctgctgcccggcattcgtttcctacatcaagaagaacttcccgaccatggttgataaaatctcgcacaacctgtccccggcagctgagatcggccgctacatcaaggagaccactccgggcgcaaaggtcgttttcatcgggccgtgcaccgcgaagaagatggagttcaaggaaggcgagccggcaagccagtacattgactgcacgctgacgtttgaggagctgcaggcactgtttgacagccgcaacatcgacctcaccacactcgaagagggcgtgcttgacaacgcctcctactacggccgcatctttgcgcgcagcggcggtctgtccgacgcggttgtggaagcgctcaaggagcagaacaacgaagacttcaagctcaacgccatcgcatgcgacggcatcgaagcctgcaaggcggctttgctgcgtgcctccaagaatgttctgccgaacaacttcattgagggcatggcgtgcaccggcggctgcatcggcggcgcaggctgtctgacccacggcgaaaagaacaaggcagatgtcgataagtacggcaagcaggcgatggagaagacaatcctcgacgccatctccgtgaccgatgtcggaccggaagccgaataattaaccgaaatgagatccggtctgctgtgcttgcaggccggattttgttctattttgaaaaaacgagaggagttttaccatgaaagcaacgtattttatgggccacgagacgtttgaggtgcgcgagtgccccatcccgaaggcaaagcccggcacagtcgttgtcaagaactacgcctgcggcgtgtgcggcacggatgtgcacatttaccacggcgaaaagggcagcgcagcggtcaacccgccggtcgtgctcggccatgagtattccggcgtcgtcacagaagtgggcgagggtgtcaagggcctcaagattggcgaccacgtcaccatcgacccgaacatctactgcggcgagtgcgaatactgccgcaacggcaaaaagcagatgtgccgccatatggaggctgtcggcgtcacgatgaacggcggctttgaagaatacagcatcgtgcccgccgcacaggctttgctgctggatccgaatgtaccgttagaatacggcgcgatgagcgagccgcttgcttgctgcctgcacggcatcgaccgcgcggagatcaaggtgggcgacatcgtatgcgtggtcggcggcggtgccatcggcctgctgctcgtgcagcttgcgcgtcttgccggtgcggctaaggtcgttttgagcgagccgaacgaagcgcgccgcaaggttgcaaaggagctcggcgcggatctgtgcattaacccgctcgaagacggctattacgaaaaattcctcgcgttcgtcggcggcgacggcgcagacgtcatcattgagtgcgcgggcaaccacgccgctgtggaaagcgccttcaagtttgcaagacgcggcgcgacgatcctgctcttcagcgtgccgaaggtggaagcgacctacgaagtgccgcttttcgacgtctaccagaaagagctcaccatcaagggcacgttcgtcaacccggatacgcacctgcgcgccgtagagctcatcaactccggccgcattcagatcgcgccgatcatcacgcacacgttcacgctcgatgagctgccggaagccattgccatgcagatgagcgccgaggccatcaaggtcatcgtaaaagcgtaaaccgcgcgcggtgctgaacttttaacaaaacattctgcaaaggcgtgccgttttccgtgcagatgcagattttttcggtttgccgtgagttttcattgtactttttaaaaaattgcggtataataatacaaatcggcttaaagcgctgcttttgggccgtgtgtggtaaaaaataaggtgtatgaggacgcacctcactcccggagaaaggaatgctttcgtttcagaaagcggtggctgaattatggctcagaatctctctaacgatcatattaacctgaccatgctgacggatttctatgagatcactatggcaaacggctattttaccaatggttttaaggataccatcggctactttgatatgtttttccgcagagtgccggacggcggcggatttgccattatggcaggcgtggagcagctcgtcaattacttgagtgagctttctttcacgcaggaggatatcgattacctgcgctccaagcacatttttcgcgaagagttcctcgattatctgaagaacttcaagtttacctgcgatgtttgggctgtgccggagggcacgccgatcttcccgggtgagccgattgtcaccgtgcgcggcccggtcattcaggcacagttcgtggagaccatggttttgctgtccatcaaccaccagagcctcatcgcaacgaagacaaaccgcatcgtgcgcgctgcggacggcagagcggttatggagttcggctcccgccgtgcacagggctttgacggcgccatttatggcgcgcgtgccgcatatatcggcggctgcgtcggcactgcctgcaccatcagcgaccgccgtttcggcgttccggcgctcggcaccatggcgcacagttgggtacagctttttgacagcgaatacgaagcgtttaaagcgtatgccgaagaatatccgcacaactgcacgctgctcgtcgatacatacaacgtattgaaatccggtgtgccgaacgccatccgcgtctttaacgaagtactcgtgccgcagggcttccgcccggccggcatccgcatcgacagcggcgacatcacgtatctttccagaaaagcgagaaagatgctcgacgacgccggctttgaagactgcaagatctgcgcatccaattcccttgatgagtacatcatccgcgatatgctcatgcagggcgcaaaggtcgattccttcggcgtaggcgagcgtctcatcacgtcttccagcgagccggtgttcggcggcgtttataagctggcggccgttgaaaagccggacggcaccatcgttccgaagatcaagatcagcgaaaacgtagcaaaaatcaccacaccgtgcttcaaggaagtttggcgtatttttgaccgcgagaccgacaaggctattgcggatgtcatcacgctgaacgacgaggtcatcgatgacgagaagccgtatacaatcttcgacccgaaccacacgtggaagcgcaaaaccgtggagaatttccgcgccgtgcgcctgcgcacccagctgtttaaaaacggcgagtgcctgtatcagccgcgtgccttaagcgccatccgcgcgcattgcctcgcgcaggtcgatacgctgtgggaagaagtaacgcgatttgaaaacccgcacagctactatgtggacctttcccagaagctgtgggacgagaagaatcgcttgctttccgaaaaccagtattaaaatccaatcatttcacaaattttgcgagtaagccggacagctgcgggtgtacgccgaaaggccgcatctgaggaaagtccgagctccacagggcgagaataacggctaacggccgccgggggcgaccccagggaaagtgcaacagagatataccgcctgcattgcaggtaagggtggaaaggtgcggtaagagcgcaccggcgcgcaggagactgcgcggccatgtaaaccctattcggagcaacatcgtggagaaacatatacgtcggcccggcggtttcgaggagatggcttgagctgcacggcaacgtgcagacgagaaagatggttgtccaagacagaactcggcttataggtttagtcgcaatcttgaataaaaggggacagagagtgcaagctttctgtcctttttgtttattgcatataaaaatgcctccccgttttggttaaaacgatattgacaaaattcgcgcttttatgttattctttttgtaacaaaagcagtttcccgtaaacgtgcatatacttttaacatcgggagaacggttgcggtcgttctctttttacgtattcgcgcgctttattgagttactgtactgatttaaaaggaggcggacgatatgaaacgcaaatgtgtggttgttttggcaatcttggtgctgatgcaggtgctgtgcggcgttcaaagcgcgccgaaagcacaaacagcaggggagaaaaagccgacgatcttagtggaaagcaaaaatttcttcaagaataatccaatcacggagatttacgaatacctctacggcgagtgcccggtggagtttgtcgcgctaccgagcaatggagccgagcgcgaagcaaagatagaagaaattcgtgccgagatcgaagccggcggcgggcccgacgcgtttattttggcggcgcacgccccgaactcgacttgtacgtccgcgcttttcccggatgtggagcagagtatggcagacggcgcatttctgccgcttgatacctacatcaaaagcagcctctatcttgacccgagcgcacaggtgcagccggtgtttaatgccggcaaggtaaacggtgagcaggtcgtgctgccgcttttgtaccgcgtgaacgcctatctgctcgataaagcgcagatgcaggacccgaacgcgcagtatacgtcttttgacacgctgaaaacctgcaaggacgatactgttttgagtgttttgcaggcacagcaggcgagctggtacggcgcacagtttgcgaatattgaaaccgcatcggaattttccgtgcccactgccgaaaatgaagttgcagacgccgaagtttcacttaccggcggcgcatggtacgaagacggctttacctattacgcacagaacaaaaacgacacctacgcactgaccgtcccaaacgatgcgggcggtgtgacggcgttcgtcacggcctatgcggcggtgaatccgaatacgaagtgcgccgaggaagtctttaaatacctcgagctcttttacagcgatgccgtgcagagcgacaacggcctgcgcgataaagaaacggaaatcacctacggcgcgctcgcaagaagcaatatgtttgcgctgctgagcgcagatgtcagcaccgtaacgggcgaatacgcctacgaaaacgcagagctgcgcaatgagattaacagccgtatcaacgcggtgcgcttttacggcgaaaaggaccgcaaattgctcaaacacgcgcctttgggctgatttttcggagaatttcaggaaaatagaattttcctcttgcaaaaccgaaagaactgtggtaggatagtcaaaacaaatttgaaagaaaggggtatgacaatgttccgctttgttcgcgttatgatgaatatgcagtccgcgaatgccatgggtaacggtatttgctgcgggcctacattgtcatacgctttttgagagttagaaagaacctaaccgcataaatcgcaatgaacagtgcaggctgaatgaacggtctgcactgttttattttcaggagaaatcaggaggaaacacaatggaacacaaggggactgtcacactcgaaacgccaagactcattttgcgccgcttaacgcttgcggacgcagagccgatgtaccgcaactgggcgtccgaccctggggtcacaaagttcctcacatggcccgcgcacagcagcgtagaggtaacaaagcagatcctcgcactgtgggcatcgcactatgaggagctcaactattaccagtggggcattgttgtaaaggatgaaaacgcgcttatcggcaccatcgctgcggtaaaaacggatgatgagatcaaagctgcagagatcggctactgcatcggccaaaactggtggcacaagggctatacgagcgaagcactcggtgccgtgattaatttcctgtttgacgaggtcggcctcaaccgcattgcggcgcgccacgatgtgaacaactcgcactccggcggcgtgatgaaaaagtgcggcatgcagtttgagggcatcatgcgcgagggtgcaaagaacaatgggggattgtgcgacatcgcaaattatgcgattttgaagaaagatcgcgcataaatcgcgttttcggggagaaaattcaaaattttccttgctaaaccgatagcgtttgtagtatgataataaaagtgattatttgcggagaaatgccgcatgccaaagcgtaggttttgcgtgtgcagtttaagtgccgcacggaaaggaatgtggtcatcatgaaaagaacagaaatcgcggccctctacggatcgccggagacctttggcgatacgcaggtcacggtctgtggctgggcgagatcgatccgcgactccaaagcgctcggatttatcgatctgaatgacggcagctgctttaagggcgtacagattgtctttacggcggaaaaactcgaaaattacaaggagatcgcttcccagaatgtcggcgctgcgctgcgtgtcaccggtacgttgctgctcacgccggaagcgaagcagccttttgaaattcaggcggaggagattaccgttgagggtgcgtcctcgccggaatacccacttcagaagaagcgccacacggtggaatacctgcgtacggtcgcgcacctgcgcccgagaacgaacctcttcaacgcggcgttccgcgtgcgttctgctgcggcgttcgccatccataagttcttcaacgagaacggcttcacctacgtgcatacgccgattgtcacgggcagtgactgcgagggcgcgggcgagatgttccagctgacaacgctcgacctcgacaatgtcccgaaaaacgaggacggtacggtcgattacagcaaggatttcttcggcaagcagacatccctcaccgtttccggccagcttgaggcggagtgcatggccatggcgttcggtaaggtctatacgttcggtcccacgttccgcgcagagcgctcctacacgcagcgtcatgcggcagagttctggatggtcgagccggagatcgcgtttgccgatctcaacgacgacatggatctcatggaggccatgatcaagtacatcattaaagacgttatggcgcgctgcccgcaggacatcgacttcttcaaccagtttgtcgataagggtctcaaagagcgtctggagcacgtggcaaattccgatttcgtccgtatctcctatacggatgccgtaaagctccttgaaaagaacaacgacaactttgaatataaggtctcctggggctgcgacctccagaccgagcacgagcgctacctcaccgaaaaagagttcggcaagccggtgttcgtcaccgattatccgaaggagatcaaggcgttctacatgcgcctcaatgacgatgacaagaccgttgcggcgaccgatctgctcgtgccgggcatcggcgagctgtgcggcgcaagccagagagaagagcgctacgacgtgcttctgaaccgcattcgcgaactcggccttaacgaggaggattactggtggtacctcgaccttcgccgtttcggcggcaacaagcatgcgggcttcggtctcggcttcgagcgcatggtcatgtaccttacgggcatctccaatatccgcgacgtactgccgttcccgcgcacaacgggctctgcggagttctaaatttcataaaagcaattttgccggtgcagttcgctgtgccggtttttgctttgttatacgcttgtcagaatgaacggaaaagcaggaaaacacgtcgtacaatcgtgcaaaacgggaaaaaatgcaagatttataaataaggcttgcatttttagcttatttgcattacaataagaattgtttcaggcgctattggagcgtaaaaatgaattgaatacttatttttcaattcaaaatcttatttatggagatgttttcgtggcgtacgcaaacttgagcaaagcagaattacagaaggttttcgatgagctttccgcagaatataagggctaccaggccaaaaatctttcgctgaacatggcgcgcggcaagcccagcgcaaaacaactggagctcgccctcggcgttttggaagcgctgaaagcgagaagcgaatttgcgaattccaacggtgatgactgccgtaactacggtctttgggacggtctgccggagatgaaacgcattttcgccgatatggtcggcgtaccggcttcgcaggtcattctcggcaacaactcaagcttgatgatgatgtttgaggttatttcccgcggcttctcgcacggttacaacggctgcacaccgtggtgcaagctggataagaaaaaatttctctgtccggtgccgggctacgaccgccattttgccgtaacggagtattacggcttcgagcttatcaacatcccgatgtatgctaccggcccggatatggatctcatcgaaaagctcgtcaaggacgatgactccatcaagggcatttggtgtgtgccgaagtattcgaaccccacgggtgtcacgtattccgatgagactgtccgccgtttcgccgcattaaaaccggctgcaaaggacttcaaaatcatgtgggataacgcctattgtgtgcatgacctcaccgatacgccggatacgctgctcaatatctacgatctctgcgttgaaaacggcacggaagatcagatcttcatttttgcctctacgtccaagatctcgttcccgggcgccggtgtggccggcctcgctacgagcgataacaatatccgcgatttcaaggagcacacgctcacgtctaccatcggcccggataagctgaatcagctgcgccacgtgctgttcctgcacgacatcaacggtgtgcgcgccctcatgaagggccaccgcgccattttggaaccgaagttccgcctgtgtgagctgatgttggaggaaaatatcggcgacctcggcatcgccgagtggaataagccgaacggcggctatttcatcagcgtcgatgtgcttgacggctgcgcaaagcgcgtcgtgcagctgtgcaaagaagcgggcgtcatcctgaccgatgccggcgcgacgttcccgtacggcaaagacccgcacgacagtaacattcgtcttgcgccgtcgttcccgccgcttgaagagctcgaacaagccatggaagttttctgttgctccatcaagcttgccgctgcagaaaagctgctgaacgcgtaaaaatttcatacaaaatacagagcaagagagggataaaccgtccttctcttgcttttttgcataaaagcggacatcttttcaaaatcgccttgacgccgaatataagttttgctatactgggaaatacgggagaatagttttaattcagaggagaacgatatggaaaagaaaaacaacagaaaaattctcgaatatttcacctgcgaaaataaagagcactggctccgtgagattcaaaagagcgattggggagcagggcagtacctttacagcttgctgaaagaaaataagctgaaagcacttgtcggcgcaacaacactggttttgatgctggcagacggcgacaagctcgtctcgttctgtacgcttgcgccgcttgatgacgtgcagccgacatcgtacacgccgtgggtcgggtttgtgtatacattcccggagtaccgcgggcagcactgtgccggtcggcttttggactgcgcagaaagcatcgcggccatcatggaacggaagtacacatacatttctaccaatcacatcgggctgtatgaaaaatacggctatacatttttagagaccgcacaagacatttccggcggcgagacccgcatttaccgcaaggcgcttttagacggcgggccggaaacggagcgccgcctaaaaaacggagcccggtataaatcggagattgtccgtgcagcgcgtacaggcaccgacccgacggcgtattgcgggctttcgtgcgaccattgctttttagggcagtggtgcggcggctgtcggtcggattttaactgttgctcctacggcacgctgtacgagaaaggcgtatgccccaatgctgcctgctgtaaggaaaacgggcttgacggttgctatgactgcgcggaaattctgatgtgcgaaaagggattttacacgaaggacaacgacggcgcagccgccgccaaggcgcaggcgctgttcattcataagcacggcaaggaagagtttttcaagctgcaaaacgtcatgcacaaagcgcgtgatttcaagaagatacaggaaatcttgggccaaaacacgcaggagggtttgcacattttagaaagctttatgaaaacggaagcagatgtttgacggcactttcgatttttgaatgtattttatcaaaatacaataattttaaaattgtattttgaagttctgcttttgtaaatttgcggtttttaatttatattgatttggattttactgttagtattccggcttttttcaacatgccgaccagcatgaaaaaagtgccggtgtaggggatgagccaaaaattgcggctgataaggctgcaatatacagcgaaaagcatcacggcgggcggggtgcgcgtcattttggcgagcagcttcggctcaatgatctgtcgaatgacgcttagaatgatccatccgatgaaaagcccgagtgcttgcgccgcgctgccgcataacaatcggtaaacggcgagcggcagcaaaacagttcccggcccaaagaccgggaaaatatcggagaccgtcacaacggcggcagtcatcagcgggtattccatgcgcagcaggtggagcatcacaaaactttccgcaaacgtgatggtgtaaatgagtgcataggcagaaacaaacccgacggaagattcactttttgcggatttttgcaggttttctacgcacttttcaccgatgagcttctttaaaagtgacagcaaactttcacggtacagcagggtgagatacgcaaaaaccgggatgagcgtgagcgttaaaaacacggcaggcagcagcaaaatcgcttttacggtgccttgcagcgcgggcatggcgacacccatgttacccgaaaaattcttctgcgcagcggagatccactgcggcaattcctgccatgtgcgctccaaaaacgaccgcacggcgggggcgagtgcttcgtagcgaaagtatcgcccggaagcaaaaaacgcggcgctttcccggatgagccgcgtgaaaagcaatgcaagaaggacaagtgaaacggtataaacggcgacagcagtgcaaagtgcggcgcgcttatgggagagatgcagccgtttttccagcaggcggcatagcggtgctgtgatccacccaagcagcccgccaagcaaaatcgggagaatatgaaaaataaatcgaaccgccaaaacaaagacaactgtatacagtattaataatacgataaatatctttttgctttttacaaatttccaaacgcgctttaccacctttgcaccgtctttcctttacagatttgcagcgcacatagtttggctttgcgcggcggaaaaattcgcaaatttaggcaaaatatgcatgacattttttgcgcggtatgctacaatatcctcgaataaatgtggtgcatgcattttaatgcaccgataacggctaaaggagcttgagtttatggaaattacagtcagcaaacgttttctacgcgtgccggtgaaatttgacggcacttcgcacaaatttactttttctgaaaacggcacaccggtttataagttcgatgccgtttatacggaagaaaacgcagatgcggtttattatgccgacctgcgcgattaccttggtaagacgatgactgtcacggtagagccggagtgcgcatttacaccggtgtttgaggataccatgacgccgcttacggcggaagagaccgtcttgcgcccgcagctgcactttacagcggagcgcggctggatcaacgatccgaacggtctgtgcttttacggcggacagtatcaccttttctaccagcacaatccctacggcagactgtggggcaacatgcattggggtcacgccgtgagcccggatcttctccactgggaatataaggaagaagcgatgttccttgacatggacggcgcaatgttttccggctgtgcggtagtcgatcacaacaatgtttccggcctcaaggaaggcgatgaaacgccaatcttgttcttttacacctgcgcgggcgaaaaaaagagcacacagtgccttgcgtacagcacagacggcggtaaaacgctgaaaaagtatgacaaaaatccgctgatcgacgagattgcacccggcaaccgcgatccgaaggttatttacgacgcaaagcgcgcgcgctggctgatggcactgtattttgtggagcgcacctacgcaatcttcacgtcgcaggacttactgcactgggaacttctgcagaaatttgacctgcccggtgatgacgagtgcccggatctctatccgcttacagcagatgacggcagaacgctgtgggtctattccggtgcgcatgacatgtattttgtcggtgattttgatgaaaacggcctttaccaaccgattcagtcggtcgggcagctttcgtataactcgcaatcgtatgcggcgcagacgtattactacgagccgggcaagccagtcatccgctttgcgtggaaccgcagcgatattcccggcgcaccgttcaacggctccatgtgtacgcctaccgaaatgacgctgaaaaagcacggcgaccgctactatctctctgcattgccgatcaagagcacagaaaatctggttgtaaaatctgacaagctcgacgactttacattggcgcactgcacgcacgagctcggcagcaagacctgccgcatctcctttactgtaaaggaaggtgaccttacatgcagcttgtacggccttgagatgaagcttgacaaaaacggtctgacctgcggagaatccatattgccgcgcctgaaaaacgagccgatgaaggtggacatcattaccgatacaaacagcgtagagatttatttgaacggcgttgcaaacacggtcatcgcgcatgtgctggatgagacgaagccgacgttcacgatccacgccgaggatcccgttgaggtgcagaacctcacagtttccgagctttcgctgtgatgcgtgcaatgaagcgcgtactgaccatcgccgggtcggattgctccggcggcgcgggtgttcaggcggatatcaagacaatatccgcacacggcgtgtacgcgatgagcgtgatcgtatccgtcgtggctgaaaacaccgtgcatgtgctggaaaagcaggatattgcgccggagattgtccgcgcgcaggtggacgcaatctatgaagatatcggtacggacgccgtgaagattggcatgctgccgacgccggaggtgatgtctgctgtggcggaaaagctgcgcaaatactgtccgaagaacgtcgttgttgaccctgtgatgtatgcgaaagacggaacggcactgatggctccgcagtcgattgagacattcaaagcggaaattttgccgctcgccgacgtgctgacaccgaatattcccgaggcggaggaaatcaccgggatgcacattgagacggaagacgatatgtgtgctgcagcaaagttgatttacacaatgggctgtaaagctgtgcttgtaaagggaggacactttgcaggcgacccgatcgatattctgttcgatggtgaacagcatataagctttacatcaagacgcattcaaacgaagaacacgcacggcacagggtgcacgctgtcttccgctattgcctcgaatttggcgcttgggtatgcacctgctgaagcggtgaagcgtgcgaaagactatatgacgtgcgccatcgagcacgcgctcgagctcgggcacggcgcggggccgacgaaccacttttacagcttgtatcaaagcggacttccaaagtaaatagcttgctccatagagaaagcaccttgcaaaacttttggccttgcagggtgcttttcatgtttgaaaaatcgcggcggatttcgggcgcacttttcaaaggcataaaggcacatttataaaaagggcgatggcccgttttttccactttggttctaaacccggcggcacgtccatagaattgggcatacggagcggaaagaaaggtgtgtgcgatggattttgaaaaggcgatccgcccgcttgggcgctttacaccgatgcttgaaaaggtgccgcaggcggtgcgcgacgcggtgtttgacattcgtatcagtgtggataagcctgtgctgctgtgctgcggcgaccgcattttgtttttgcgggaagacggcgacacggcgcagtatttttcgcaaaacaatgtgacagcgacacgcgaggacgtggaggagatctttttgcggctgtgcgggtattccgtttacagtcacatggaggagattcgcggcggattcgtctccgcagaccgcgcgctgcgggtgggcatcggcggtacggcggtgatcgaaaagggcggcatcaaaacggtgcgcgacgtgacgagtctttctgtgcgtatcccgcgagagaagcgcggctgtgcagaggaggtgctgcgctgcggcgtagacctcagccgcgggctgctgcttgctggcgcgccgtcctcgggcaaaacgacgctgctgcgggatattgcacgatatatcggtacggcgggacaccgtgtggtggtgcttgacgagcggtttgagctgagtgcggacgggtttgacctcggcgcgtgcacggatattttgcagggctacccgaagcaggaggggctttcgcacgcggtgcggtgtctttcgccggagtacatcgtctgcgatgagctcggcgaaaacgatctttcggcgatacgtgcggcatcgttttcaggggtggcgctgattgcgagcatccacgcgggcagtatgcacgagctgtgttgccgaccgctgtgccgcgggattctgtcgctcggcgcgtttgaaacggtggcactgctgcacgggcgaagtgcaccgacgaaagtggaaaagctgtttttggcgggtgatcttcttgaaaacaacggcggcgatcctgattgttctgtgcgcggcgaccgccgggtcatcggtatctgcgcggctaaaaatgcgtgaaaaagagctgagcatcttcttggaagcgcttttcgccttgaaaaacgccgcggcctatacggcgggcgacctgtacgcgctgctctctctgtgccgcgaaaacgcttttttggggcgcgtgtgggtgctttctgaaaacatggattgcacaacggcgtttaaagcggcggcacatacattttttacataccgcggggatgaagcgctgtgcgccgcgtttatcgacgggttcggcaagaccgacctcgatggacaaatggcgtactttgcgctgtatgaaggccgcgtgcgcagcgcacttttagccgccgagcaaagccttgcccagaaaggcagattgtgcgtggcgctgggactgtttgtcggcgtttccgtcgccctcattttgctgtaacagccggaaaggaaagcaaagctatggatgtagatctgatcttcaagatcgccgccatcggcatacttgtggccgttttgaaccagctgctcattcgctccgggcgggaggagcaggctatgatgacgacgcttgcggggctcattgtggtgctgacgatgctcatcacgcagatcagcacgctgttcgatacgattaaatcggtgtttgggctatgagcacggtgcttatggtatcggcagcggcggtgtttgcagcggtgtgcggcgcgcttttaaaacgcgggcaaaaggaaatagctctgctgttttcgcttgcggcggcggtactcgtttttctgtgtattttgccgcagatcgaaacgctgacttcgacattccgcgaatgggcggagctttccggcatgccggaagtgttcggagcgctgttaaaagcgctcggcatcgtgctcatcgggcgcataacggcggatctttgtaaggacgcgggggaatcggcaatagcaagcggtgtggagcttgccgtaaaaacagcggtgctgctgacggcgctgccgttgctgaatcgacttctctcgcttttgcaggaagtgctgttgttatgaaaaaacggattttgcgcgtttttttggctttgacggtgtttatcctgctgctttcgctgcctgtgcgcgcggacgaagcggaactctaccaaaacagcggggcggatacacttatggaggcgctgccggaagaagcacagtcgcttttgcagaacatcggggccgacccgatggaaacacctgcgcccgacgcggcggcaaagctgttttcggcgctttccgagggctttcgtgcggagtggacagcaccggcgcgggcactccttacgctgcttgcatcatgcgtgctgtgcagacttgtgcaggaattcgccgcaaaggagctttcatacgccgtttccgtatgcgaggcgctgtgcgccgccgtgacgctgctttcgccgatggcttcgcttttggagcaggccgcgcgcgtgacggatgctgctgccgtttttctgcttgccgcggtgcccgtgtatgcggggctgcttttcacggcggggaacaccgtgacagcaccgacctacggcgcgctgtcgcttgcagcggcaaatgccgtctcggttttgagcagcgcggtgctcatcccggttttgcgtgtgtttttggcgttttccgtggcttctgccgtgacatcgtttgatttaaagcggctgacggacgcgctgtataaagttatcaagtgggctttggtgctcgccgtcacggtatatacgggcgttttgtccgtacagacaattgttgcgaacagcgcggagatggcgggcggcaaggcggcgaaaatgcttgtctccggcgcgatccccattgtgggcagcgcgttttccgatgcgttttcggttatcgtttccggcgcggcgcttgtaaaaaacggcgtgggtgcatttgggttgcttgcatcgctcgcgatttttctgccgctgtgcataaaggctgccgcgtggcttttgatttgcttttgcgcggggcttgcggcagaggtgttgggtctaaagccgcttgcgtcgtttttaaacggctgtgctgcggctctgcggctactcattgcggcggtatgcagtgtgggtgcggtggcggtggtctcggcggccgtggtgctttgtgtgcgaggtgcttatgcgtgaattgtacgcgctggtgttttcggtgtgcgtggtgctcatcggcacggagatgatcgtgcggctgttcccggaaaaaagcgggtcacttatccacgcgcttgcagcgctgatgctgcttgtggtgcttgtaaacggcattttaaagctgcaaagcggggcctcgctcgattttgacttgaccgaaacgggcgaagccgaatcgacgataacgcaaagctacgcggaaaagggcacggcgattttgaaagagcggctctcggcgcttttgaaaagtgcggggatggacgtgccggcagcgaatatcgacatttggtacacgcaggacgatgacggcgtggtgacggtggaacgtgtgcgggtacgggtgcggtttgcgacagacatcgaccgcgcggacgcgcttttgcgcagcgtgctgaccgaggccatcccggtggatgtgtacgtgtaggaggtgaggcgagacggataaactgaaaagccttttgaaaaacggtaagctgacgtatatgctcattgcagcctgcgcggcgctcgttttattgatgctcctttggcctatggacacaaaaaacacggaaaatgaagcgccggagacggtggaactgacggcgggagactacaccagagcgctttccgcgcagatcgcgcagatggtctcggctatcacgggggaaagcgagccgcaggtgacggtgacgctgcgtacaatgggcgaaacggtgtatgcgaccgaagataagcagagcgaaaaaagcgccgaggagtacagcggcgaaagcctcaaccgcacgcagacggacggcgacacgcagaagacgtatatcctggtgaaggcggcggacggctcgcagaagccgctcatcgtgacgaaaacggagccggagatccgcggcgtggtagtcgtgagccgcgggggaagcgacccgaaaatgcgggagaagattgtggaggccgtgaagactgcgctcgatttatcctctacgcaggtatgcgtggtggggtacagcgaatatacatatggcaacgaatgaaaccattcagtgaagatcggaggaacacggaatgaaatacggtaaaagacagctgatcttggcatcgcttgtgctggcccttggtgcggcggtgtacttaaactggcagtttgcgggcacaaaggtgcagagcgcgggcgatgtcagcgaggaaagtgcgtcttccgctctcggtgcggcgcagcttgtgaacaacgcctatgtggagacagtctccgacacgcttacgaacgaggacggcgttctgccggaaacggagcccgcagacggtgcggcggaaagcagcgcggcagaagaaacagcggctgcggtatcgtcttccgcaaagctttcggacgcccgcttgacgcgccagaccgcacgggatgaggccgtggagctgctggaggacatcctgaaagacgacagcgccgaggtcgccgtaaagcaggccgccgtggacgaagccgcggttatcgcgcagaacattttgaaagagacaaacatagagtccctcatagaagcgaagggctttacggagtgcgtggcgtacatcaacggcgagagctgcacggtggttgtaaacggcgacatggaggacgaacagaacgcgctcatcgtgcgggacattgcagtttccgaaagcggcgtcagcgcggaaaacgtgaagatcatttctgcggcgaaataaaagatgatttcttgcattttaccgtttatcgtggtatactattccagaacatatcggcgtgtatgtctggagcttgaaaactgcacatcaaacggcaccggtgaaaaccgaaagtgcctgatttctgctcaaattgcctgccgatccttcggcgggcttttttgtttatatccgccatgaattacgcaatgaattttattgagataagggaaaggaaccgagtatgacgaaaagaagagaatcgagagaacaggcttttacgctgctttttgaaaagaccgtgacgggcgacagcatggaagacatcattgaaatggcggaggaagcgcgcgacgttgttgtcgatccgtactgcgaaaagctgaccgctttgacggagctctatttagacgagatcgaccacacgatcgaagaaaacctgcgcggctggagtttgcgccgtctttctaaaatgacgctgacgattttgcgcgttgccgtgtgcgaaatgcagtttatgcgggccgacgatgtcccggtgagcgtttccatcaacgaggcggtggagcttgcaaaaatttacggcaacgaaaaggacgcttcttacgtaaacggcgtactctccacaattgcaaagaagcttgagggagcgaagaacgagacggagagcgaaaatgcctaacatcagcgcgctcggtttagacaccagcaactacacaacgagcgccgcgtttttcggcgacggcgaaatgaacagccgcggcatgattttgcctgtgaaagagggcgagatcggactgcgccagagtgacgcggtgtttcaccacacgcgccagctgccggaggtgctgtccatgcttggtgataagatcggcggcgcgaaggtcattggcgtttcggagcgcccgcgtgatgcgaagggctcctatatgccgtgcttcttggtcggcatcggtgcggcgcagatgcttgcgcaggcgttaggggtgccgctgcggcgcttttcgcaccaacaggggcacattgcggcggcgctttactctgcccaacgactggacttgctgcacgagcgctttttggcgtttcacatgtccggcggcacaacggaagcggttttggtagaacctgtggagggtgacaaaatgtttcgcacgcgccttgttgcgtcttcactcgatttaaaggccgggcaggtcattgaccgcatcggcgtgatgctcggtctgccgtttccggctggcaagcatttagaccccattgcgtgcaattatacggaaaaactgcgcgtgcgcgcttcgatgaaaggcgcgaactgctcgctttccggtgtggaaaataaatgccgcgagctgatgaaaaagggcgcgccgaaggaggaaatcgccgcgacgtgcatggcgtatgtcattgcggcatcggatgcgatgtgtaaggcgcttatcgagacattcggcgatttgcccgtggtgttttcgggcggcgtgtcctcaaactccatgctgcgcgcgcacatgagcgaaaagtacggcgcactgtttgcggagccgcgtttttcggcggataacgctgccggcatcgccgttttggcgtcactttcgcaggaggcctgatatgcgcgttttatcggtttcgcagatcaacttttttataaagtcgcttattgagggtgacggccgcatgcgcgacatttacgcgcgcggcgaaatttccaattttaccgatcactaccgctccggacacctgtatttttcgctgaaagacgaaaagtccgttttgaaggcggtcatgttttcgtctgccgcacgcaggctgcgctttcacccgaaggagggtatgcgcgttatcgtgcgcgggcgtgtggccgtgtatgagcccggcgggcagtaccagttttatgtggaggaaatgcagccggacggcgtgggcgcgctgagcttagcgtttgagcagctgaaagaaaagcttgctgccgagggactgttcgcggaagaacacaagcggccgatcccgccgtttccggcgcgcatcggcgttattacatcgccgacgggcgcggcggtgcaggatattcgcaacatactctcgcggcgctggcctgcggcggagattgtgttttgcccggtgcttgtacagggcgaggacgcagcggcgcagcttacgacggcggtgaaattgatgaacgcccaaaaggcggcggatgtcatcatcatcgggcgcggcggcggctccgcagaggatttggccgcattcaacgacgagacgctcgcaagggcagtgttcgcgtcgaagatacccgtcatctccgctgtgggacacgagacggattttacgatttgcgattttgtcgcggacttgagagcgccaacgccgagcgcggcggcagagcttgccgtgccggacagggaagaaatgcgtgcggcacttgcgcagctgacgcgccgtttgtgcggcagcgtgcaggcggggcttgacgatcggcggcagatgctcgatgcgcttgcaagcgcaaacgtgctgcaaaacccgtccgcgtggctttcaccgcgtaggcaggcgctccgaaacacggtgcagagcctgacgcacagcgccgagcgaagaattttgaatgagaaaaacgagcttgctgcgctttccgcacggttagacgcaatgagcccgctgaaggtgctttcacgtggatacgcgatcgtgtccgacgaaaacgggaaagtgataaagcgcacggaagacgcaaagccgggcgacgttttgacagcgcgcgtagaggacggcgtgatcaccgtgcaggtgcagaaaacagaaaagagggaaatgaccgatgcctaaaaaaaccatgacctttgaagacgcgatgctgcgccttcgcgaggtgaccgagacgctcgaaaagggagatgtgacactggaagaatctgtgaagctttttagcgagggcgcggagctttcccgcttttgctatgaaaaattaaacacggccgaacagaaaattacggagctgagtgctgcgaaaacggaggaataaaaatggaagacagggtaaaacgcattgaaaaagccttagatcattttttgccggagcgcaagggctcgctttccgagaccgtgaccgacgccatgcgctattcgcttttaaacggcggcaagcgtgtgcgcgccgttttaacgcttgcgttctgcgagatgtgcggcggcgatgaagacatggcgatgccgtttgcgtgtgccgtggagatggtacacgcgtattcgctcatccacgatgacctgccgtgcatggataacgacgatatgcgccgcggtaagccctctaaccacaaggtctacggtgaaaattacgcattgcttgcgggcgacggccttttgacaaaagcatttgaaacggcgctgagcagtgaagcattccgaaatgtcggcatggagcgcgctgcgtatgcggcggcggtgcttgcgcgctgcgcgggcgagcacggtatggtgggcggccagtgcattgaccttgcaaccgaaaaccgcaccgtttcgctcgatgagctgtgcgaaaaagacaccggcaagaccgcgaacctcatcatggcggcatgcatgatgggttgcattgcggcgggtgcgaacgaaacgcagatcaatgcagcaaaggaatatgcgctgcacatcggtttggcgttccagatccgcgacgatattctggacgtgaccggtgacgccaaggagcttggcaagaacatcggcgtggatgcacaaaacgcgcgctgcacgtatgtttccattttgggtgtggaaaaagcgcaggcgctcgtcgatgagcataccgaaaaggcgcttcatgcgcttggcgcgtttgacgcggacagcacgttcctgcacgagtttgcggaaaagctcgcgacgcgcagtaagtaatgaaacgcacactggagttcgtcatcgactgcggacaggaaaacatggacgtgcgcacgttcgtgcggcggtacttagggttttccgcacgcattttaacggcgctgaaatatgagggagagatgcttaaaaacggcgaatccgtgcacagcaatgcagttttgaaagccggcgatacgctgactctgacgctgcttgaaacgggtgaagcgtatgaaaaagccgacctgccgtttgcggttttatatgaggacgaggattttttagtgctcgataagccgtacaatatgcctgtgcacccctcgccggggcacgaccgcgacagcgttttaaatgcggcggcgtggtattttcaaaatacgccggactttgtgtttcggccgctgtaccgcttagaccgggatacgaccggcgcactggtgctggcgaaaaacaaatttgccgcaaacgcaaagctgacgaaaacgtaccgcgccgtgtgcgagggcgaaacgcccgaaagcggatgtgtgaatgtgcccatcgggttaaagccggggcataaggtggagcgctgcgcgggcagcggagacgaagccgtgacggaatttcaaacagtgaaaacgagcggcgggtacagccttgttgacttccatttgaaaaccgggcgcacgcaccagattcgcgtgcacatggcgcaccttgggcatcccgtggcgggggacgacctttacggcggtcatttggacagaacggagcaccagatgctctgctgccgtgcagtgcatcttttatgtccggcgctcgacatcgataaaacggtcgagacggatttttcggcggaacaaaaggcgtgcttcccggagctttttcaatgaaaaacaccccacagctttaaaactgcggggtagtccatatcaagtgaaattttactccacgtccgtatggatgaggcggtctaacagtgtgatgagtaaaatgcgctcttcatcggaaaggtcgcgcgtgacgcttttggcccaatcccgcaaaatctcgcggatgacgggcacgagcttttcgccgctttccgtgacgtagaggttgttttcgcggcgatcttccttgccggtttcgcgcgaaatgtagccgagctcttcaaggcgttttgtgcggcgtgctacggtgcatttgtcgatatacatgtgtgagacgatggcgtcctgcgtggtgccggggtggcggttgatgtaaagcaggatcatcggcatgccacctacaaagccgtagccgcgcaggcggtcatccatatattttttacgctggcggtgcagataggtgaagctgcggcttagatcacgcggaaaatccgcaaggcgctcctgttcggtttctgctgttttctgttcttccggcatgcttacacctccgtatggtttatggctttattatatggcttttgtgcgaaaaagtcaattcaaaaatccgcttattccgcgataaacgggtgacagacgcgcttatacagttcgtcgtcgaacataacgtgataaatgttttcgagctcatgcagcacgactttcgcttccggcacgggctgcgcgatgggcagcacgagtatgttgaaatccacgccgtacaaaaggctttttgcttttgtcatttcgcacccgcagcgctcataaaacgcgatgcggcggcgacggatgttgacttcttcttcggcttcggcgctctcaacgctttccacttcgagcaaaagaccgtcacggtctttcatttctgtgcgcagcaggggaaaagtcttgctgccgatgcccgtgccgcgcaggtcttttttgacggcgaaataatcgagcagggcgtatttgccgttttccgtgcacgaaaaataggcgtaggcgcagagtgaatcggtctcgtcgtaaaagccgtagcacggatagcagtttttattgtagagcatttccatgcttgcaaaggggcgcagctcgctcggcgggaatgcctcgtgcatatatgcgttgtaaatttcgcgaatttcgtctaaattcagctttttaatgtgtaacaaatactcaactcccattattattttggaccaagcaaaggagctttactttgaatccatttccgtatacgtttgataacaaacggtatcatacattagcttatcacaaccgggtgcagaattgcaagacccaaaaggccgtgatcgatgccgggctgagctgcccgaacatagacggcacgtgcggcgtgggcgggtgcatcttctgcgacggcggcagcggctattttacgcaggataaggcattttccgtgacggagcagctgcaagcggaaaaagtgcgtattcataaaaagtcgccggaaagtaaaatcatcgcgtattttcagacgcacacaaacacctacgcgccggttgaaaagctcagggcgttatacgaagaagcgcttgcattcggcgtttacggcgtatcgattgccacgcgcccggactgcatcgggaagggcgttttgtcgcttttaaaagaattgaacggcaaaacgcacctcaccgtggaactgggcctgcaaagcagtaatgatgagacggctgcgcgtattcacagaggatataaatacgaggtatttagagagatatttctgcgcctgcgcgaaaacaatattcgcgtttgcgtgcatatcatagacggcttaccgggcgagacggaggcggagatgataaagaccgccgaagaccttgcacagctgcgcccggatggtgtgaaaattcatcttttgcacgtcattcgcggcacgcagcttgcgggcttatacgaaagtggcgcatacacgccgatgacgtttgaggactatgtgcgcgtcgtaatccgtcaactggaggtgctgccgcccgaaacggtcatcgagcgcattacgggcgacggtgacaaaacaaagctgcttgcgcccctgtggagccgcgataaaatccgcgtactcggcacgatagaccacgagatggcagcaggaaatacttggcaaggcagactttattcgccgaatggcttgcaaaaaggacagaaaatgcgtataatagaataaacccgaacacggtgtgcagtttacgctgtgatttcgtttatgaaaggtaattttactatgaataataaagctccaaataaacacagcgacgcgcgttcttttgaaatgcgccgtttgattttccttggcgcggccggcgtgctcattctggtcgtggtcattttatcgctcctatccgcgttcggcgggaaatccgacggtcagagcaccggcaacggcacgtcttccgcggtgacggaggacggcaagctcgtcattcaggatctttacgagggtgagatcaccattccgaagtttaatgtgccgctcaatacatacgaccagtcgaagtttaaaaatgacaacggccttgtgacgtatgacgacgcgaacgcgagcctcggcatcgacgtttccgactatcagggcgacatcgactgggcagccgtcaaagcgagcggcatcgatttcgcgatgatccgcgcaggctaccgcggtgcaacgcgcggcaagctgaacgaagacagcaagtttgccgataattacaccggtgcgaaggacgcaggcgtaaaggtgggcatctacttcttctcgcaggcaacttctgttaccgaagcggaggaggaagcgggctatgtgctccagcttttgcagaataagtccgtcgattaccccgttgtctttgactgggagcagacgagcgtagacggctctcgcacggcagatgccacaggcgagcagatcacgagttatgcttcggcgttctgcaaaaaaatcgcgaaagcgggctacaccgcaggtgtgtacttcaaccgcagtcttggctataactattacgacttagagcagctcaaggattttgagttctggcttgcggaataccgcagcgtgccggcattctactataacttcggcctgtggcagtattccgacaacgcgcaggtgcagggcatcgacgcggcagtcgatattaacgtcagctttaagaactacggctgatctttaaagtaaaagcgaaaggtgcttgatcattttggtcaggcaccttttttgttattcttcgtcttcgccgaaccagctgcaggctttcatgtctacgcggccgtcgggcaggaactgcacgccctcggctttgagcttttcgcgctgtacatcggggccgccgaaaacgtagcccttgcacagagagccgtctttgaacactacgcggtggcatggcgtatttacggggtccgtgttgcggtgcagcacaaagcccacaccgcgcgaggcacgcggtttgcccgctgcaaatgccacaaagccgtaatttgtcaccttgccgcgcggaatctcgcgcaccacctgaaacacgcgctcggaaaaatcgttcatcgtattcaacttcctttgctttcaaaccgttttgtacagtatagcataaaagtagtctttacaaaagggtttttattgattataatgaaatataacgaaactaaaatcgaaacggagttgttgatatggctattattgaagtgaattttatctcgaaatgcctcatgcgcgtggtgacgttcaatgcgattatcccggtggacaaattcggcccgcaggcggaaaatgcagagcagaagccactgaagacgctttaccttttgcacggcattttcggcaattatacggactgggtgaacggcacgcgcattcaggcgtgggcagaggcaaacgaccttgcggtcattatgccctccggtgaaaaccgcttctacctcgacgacgaaaagagcggcgagctgtacggcgagttcatcggcaaggagcttgtagagttcacaagaaagctgtttccgctttccgataagcgcgaggatacgttcatcgcgggtctttccatgggcggctacggtgcaatccgcaacggcctgaagtatgcggaaaactttggctgcgtcatcggtctttccgccgcgctcgtgcacgatacgtggaaggacgcggacaactccgcgccgattttcacattccgccgcaactactacgaggcgatcttcggtgagtatgacaaggtgaaaggcagcgacaaagacccgaaggcgctgcttttgaagctgaaggaggagggcagacccgtaccgaaaatgtacctgtgctgcggcacggaggacggcctcgtcaccgcaaaccgcgatttccgcgatttcctcaacgaaaacggtgttgacctcacgtatgtggagggccccggcaagcatgattgggtattctgggatacgtacatcaaaaaggtgctcgactggctgccgcttaatagaacaggcgcgggcatcaacagcggaaacgtgaaataaagcagaacggaaaacaagggaacggatgatgcagaagaggaatctgaaaaattccgcaagatcatgatgaatgtgctaacgatgcagctcaattccatcacgatcatggatctcatctaccgccagcttataaattcgtaaacataaagtaaaagccaccgaaacggtgaagcgcaaggcttgccgcaaacggtggcttttactttacaaaatttaattctgcgttttattgccgggcaggatattgaggttttccgggacgttcgggtgggggatgttgtgcaacgcaaagcccgcgagctgacggatgatctgcaaaacgaacgaccgcgtttcggggtcgaggtgcacggcggcgttgtagatagcgccgatgttcttttgaatgtcgccagcgtcaaatacgttttcaatattgccggcggtcaaaaggccgtagagtacatcaacaaggcgtatgcgctcgtcgatgctcatgccggtgatccagctgttgagtgtttggttcatgtattttgcgccgctggaaatttcctccagcgtacggaatgcaccgtccgtcacctgccacgagaacgggtcgtgctgcataatgcccatttggttgctttccacaacggagtatgcaccgtggttttcaagcagcatgccaatgagcgagcctttcggaatgaccttatgtacgcggctttgaatgcgcccatattcttcggattcgagcgtgttgccgatgaagccggggctgtcgagcgggtagacgcgctcaatacgcttttgaatttccgggtcgcagaacatgcccgcgtaggctgcaagattgccgcctttggagtggcccatcaaaagcagtttgccgggaaaaccttcgccgagctttgtcacatagtctgccgcatcggcctgcgaggggatgacgggcagaaatgccatgttaaaatcctctttccagccgacgagcgtggcgtccgtgccgcggaatacggcgcaggcgtggtcgtcatcgaggtacacggtgatggccgcaaactgctcctctgactggtcacacagcttttcaacgaagttgccgatttttatgttgcgccagcgcgggcttgacgccatagcgtacaaaagcctcatgttgcttttggtatcgcgtacatggaacatcaacttttcaaagcgctctgcctttaaaagctctcgaatttctattttgttttcgcatttaagctcgtcttcaaacgcgctcagattcatgtaggaaaactgtgataaaagcaggctgtctacatccgtaaacggtttttctgccaaaggcgagaattcggtttctgcatattcaaggatgcttggcatagtacgccgcctttctgagaaagttaaacgtaataatagggaccgggcttacagaggattacgatgagatcgacgaacgcgccgatgccgaacaggccgccggtgaagatatacaaaacacccatgccgatctttccctcataaaatttatgcgcgccgatgagtcctaaaaacaggcacaggaaaaacgctgcccatttgctttttgccacaccaccgtaagtgacattgttgtttacataaacaggctggggctgttgggcagactgcaatggctctacctgcctgccgcacgcggggcaaaccacacagtcggcaccgatgaccgcgccgcagtatttacagaatttcgcgttttcggtgcacgtgccgcagtttgggcaaaaaagctcaccgttcggaatatttgcaccgcagtttttgcagaccataagaaaatctcctttgtatatttgaatatttgtccaccgaaatcataacacagattttgacattccgcaacgtgtttcattggtttttctgattgccgcgcacaaaagcagcacgtctgtcatagtatgccgcgggacaaagcgctgtgcatgtcccaatatgcagggaaggagggcaaagatttgatgaaacagacggttttaaagacgacggcggccgtgctcggcgcgggactcgtatcgtacctcggtacgcttgcggtgccgatgctcgtgctgcttggcgtgatgttgctcgattatatcaccggcatgatcaaagcgtatatccgcgccgagttaaattccaagttcggtattaaggggatactcaaaaagctttgctatatggttatggtcgcagtcggtgcggcggtggattatcttttgcgcggtgcagtcatcgggaccggcatcacgctcgatgtaaagctgtttttcggcatgctcgtcaccgtgtggcttacgatcaacgagctcatttccgtcatggaaaatcttgcggccatcggcgtgccggggttctcgcgtttgcagcacattttaaagcggctccgtcgcaccgtggcggatgaatcggatgcaagtgatgagaagaaggagtgatcttatggtaccgatccgcgaaaatctattatcttctgcaaaatacgatttgaaagtaccggtggaatcctgcgcgaaggacatgaaatatatcgtcgtgcacaacacggcgaacgatgcttccgccgcgaatgaagtcgcgtatatgattcgcaacgacagctctacgtcgtttaacgcggcggtcgatgacaaggagatcgttgtcggcattccgctgagtagaggtgcgtttgcggcagggcagcgcgacggcaatgcgcatggcatccacattgaaatttgctattcgctctcgggaggcatgcgcttcgataaagccgaaaagaacgccgcagagtatatcgcaaagcttttgaaggatcgcggttgggatacgtcccatctaaagaagcatcaggactttgacggcaaatattgtccgcaccgcacgctcgacaagggctgggcgcggtttttaaaaatggttgaaagcgaaatgaaggacgacaaaaaggagacaaagaccgatgcgaaacccgcgcccaagcagctctaccgcgtgcggacaagctggtcggacgcaaaaagccagatcggcgcgtatgcaatgctggaaaacgcgaaaaacgcatgccctgtgggttataaagtgtatgcctcaaacggcaaaattgtgtatgaaccgttcaaagcgtatacagtgcgcaaggacgctgcagacccgctgaacatccgcaaaggtccgggcacgaattatgacgtgcaggggcagatcacagacacgaagcgctatacggttgtagaggagagcgcaggtgtgggttctgcaaaaggctggggacgtctcaaagccggcggctgggtggcgcttgactgggtgaaaaaagcgtagcgccgatgataaggcataatataaacagaaaacacaaaatgaatttgtgaaagcaagatattgcatttttgcgtccaatgtggtatgctgaacgtattgatgcagcacgccggtgaaactgaagggggaaaacggtttcaccggcggctgtgtttgaatattcgcagaaaataggtggagaagtaatgaagaaacatcacagtaatcgcagcatgttctcgggtaagctcgggttcgtgctgtctgcggccggcgcttcggtcggtcttggcaacatttggcgatttccgtaccttgcggcaaaatacggcggcggcattttccttttgatttacattttgcttgcgctgacgttcggttacacgatgatcgtggcagaaacatcgcttggccgcatgacgcgcaaaagccctgtgggtgcatttgcatcgttcacaaagtcgcatacattaaaagccggcggctggattaacgccattatcccaatcctgattgtgccttattattccgttatcggcggctgggtcatcaaatatctttttgagtacatttgcggcaacggaacaaagcttgcggaggacggatatttttcgatgttcatctcggacggcgtgtccgccgaaatttgctttatcgtttttgcactcatcacgctgaccatcatttttgccggcgtgcgcaacggtattgagcgtgtatcgaaattcatgatgccgatccttgtcgtgttgtctgtcatcatcgcaatctattccgtcacacgtcccggcgcactgaagggcattcagtatttccttgtgccgaaccttgagaatttctcctggatgacggtcgtttccgccatgggacagatgttctattcgctgtccatcgccatgggcattcttgttacgttcggctcttatatgaagaaagaaacgtctattgagaactctacgcgcaatgtagaggttttcgacaccgccatcgccattatggccggccttatgatcatcccggcggtctttgcgttctccggcggcgacccgaacaccttgcaggcgggcccgtcattgatgttcatcacgattccgaaggtgttcgccagcatgggtctcggcacggtggttggcattctgttcttcgtgctcgtgctgtttgcggcggtcacaagctctattgcgctgacggaaagcgccgtttccacgtttgaagatgaactccattggaaccgcaaaaagtcgaccgttgtcatcggcatcatcatgctcgcgctcggcacgctttcttcgctcggctacggcccgctcgatgccgtaaagattctcggcatgcagttcctcgatttcttcgatttcttaacgaactccgttatgatgccgattgcggctattgcgacttgcctgctcgtttcccgcgtgatcggtgtagaccgtattgaagaagaaatgacgcaagaaggcggcacgttccgcagaaagaagatcttcgtcatgatgatcaagtatctttgcccggtctttgcagccatcatccttatcagctctgtcatgaacgcattcggcctgatctctatgtaaacattttgaccggcgcgacgaaagccgcgcacttcgatgatgccgcaaggtgtcattttaccggacgaaagaaataacagaatagaatgagcgaggccccggcgagcgttttgtcatgctcgtcggggcctgtgtctgttgtgcgttatttcagaactttttcataggcaaagcggtctgcgccgtccgtaaggtgaatgatgccgcagcgaatgtaaccgttcttttcgagcgtgtgctgcatgatgatattgccgggatgcgtatcgcatcgcatggaggtgacacccgcttcaagcgagagtttcgcgcagtaggtcatcaaaaacgatgccgcgccgcgcttcttcgcatgatttgccgccataatgcggtgcacgatgccgtagattttgttttctgtctgccacgcgccgttataaattccgtggtatgtcggctcgtcgccaacatacacggcggcacttgcaagaatattgctttcgtcgtctatcacaacacggcagattttattttgaatgtcctcacgcaaggtggtttcgttcgggtagccgttttgccactggtcgatgccgagcgcccgcagcgaagctttcgcgttttccaacatctcaagcagataaggcaggtcacagagctctgcatttctgatcttcattttctttcatcctttcctgttttgccgcgcagaatctgcaaaaaatcctatgtgcgcgttacaaatatgaacatatacaaaattatacgattttttgcttgccttttcaaggggaaacgtgtataatactaaagtacgcggtcaagtatgttccgcgcacggaaaaagccaaggcggttggaatataccgtggaatatgcgagcggacaggtctgcgcggcgagacaccgtgaaccatgtcaggcgggggaccgagcagcattaagcggatcgtctggtgcgatgcaggctgcctgtccgttcacatattctacgttccaatcgtctttttcttttatcacccacaaagaaaggagcgccgccgtttgtataaagcgttatacagaaaatatcgtccgcagcagttttccgatgtcgtcggtcagccgcaggtgacggtcacgttaaaaaacgaactgatggccgggcgcatttcgcacgcatatctgttcaccggctcgcgcggcacgggaaaaacgacctgcgcaaaaattctggcgaaggcggtcaattgcttggatccccaaaacggcgatccatgtggcaagtgcgacgtgtgcagaggactggatgacggctctgttttggacgttgtagagctggacgccgcgagcaacaacggcgtagacagcatccgcgcgctcattgaagaatccaacttcacgccgactacggcgaaataccgcgtatatatcatcgatgaggtgcacatgctctccgtttcggcgttcaatgccctcttaaaaacgctcgaagaacctcccgcacacgtcattttcattttggcgacgaccgaagtccataagctgttgccgacgattttatcgcgctgtcagcgttttgacttccgccgcatcgcaccggaggacatcgcagggcgccttgagtgggtctgcacgcaggaaaatgtgacaatcgaccacgatgccgcgatgcttatcgccgttacggcagacggcggcatgcgcgacgcgctttccattttggatcagtgcatcggccgcagcgacgggcacgtgacgtatgggctcgttgcggaaacggcgggccttgcggggcgtgggcacttaattgaactcgccgagtgcattcgcacgggcgaccgcaccgcggcactcgaaaagatcgacgcgctgtataagtcttccaaagacatgggcaggctgtgcgaggagcttgcgggctttttccgcaatttgatgctcatcaaaacgatgaaggacgcaagcgggcttgtaaatgccgttggcgaagagctggaagccatgacccaaacggcgctttccatggagctttcaacgattctgcacgcactcgatgcgttccagtccgcgcagtcgcgcatgaagactatgaataagcgcacggaaatggaaatgacgtttatccgtctttgcacgccggaaatggatacctcgcccgcagcacttttgcgccgcattgaagctttggagcgcggcggcctgcgccgtcccatcaccccggcaccgagtgtacccgcggctgaagcaccggcagcaccggtacaacagctcgagacaccacagaacaacgcacctgtgcagcccacagtaaaggacaagccgcagtccacagaggagcttgcaaaaaatgcgcagccgttcgacggctggtcggacattatcggctatatggaaaattattcaaagtcggtggcgtcggcgttcaagggctcagcggcgtacatcagcggcgactacatgctcatcgaagcgccgcagattgcgtttgatctcttgaaacgtgccagccagagagaaaagatccgcgaggccattcagcaggtgaccgggcgtgtgtataagctcggcccttataagtcgcccgcaacggacggcgaaaaaccgaaagatccgctcgacgcctttttgcacgatatgcgcgaagccggcgtggagatcgaagaaaaataaatttaaaaaccacacagtaaggagtcttaactatgaaagcacgtttaccgcagggtatgggcggcggcggagccgcaaatttgcagcagcttgcacgtcaggcacagaagatgcaggagcagatggagcagattaccacggagcttgaagcgaaggaatacaccgcggccgcaggcggcggagccgtttccgcaaccgtaacgggtaaaatggaagtaaagaatatcgacatcaagccggaggtcatcgaccctgatgatgccgagatgctcggcgacctcgtcgctgctgccgtcaacgaagcactgcgcgcagccgcaaacgagaaagaggagaaacttggcgcaatctccggcggcatgagccttccgggcatcctctaatggccggttatcacgtaccgccgctcgaacggctcgtcgataaatttgagagcttgccgggcgtggggcataagtccgcacagcgcattgcgtatgccgtgctcaacatggataaagcggatgctgaaagctttgcgcaggcgatcatcgacgcgcacgagcagatccattactgctccgtgtgctgcaatttgacggacggcgacctttgccccgtgtgccgcgatgaaagccgagaccgctcggttatctgcgtggtggaagacccgcgcgacgtgttcgcactggagcgcacaaatgagttccacgcgacctatcacgtgctgcacggtgccatttcgccgcttggcggcatcgggccggatcagctcaaaataaaagagcttttgcgtcgcgtgcaggacggcactgtgcaggaggtcatcatggcgacgaacccgaccgttgagggcgaagcaaccgccatgtacatttcgcgcctgttaaagccgctcggtatccgcgtaacgcgtcttgcatacggcatcccggtcggcggcgacctcgaatatgccgatgaagtgacgctttcccgtgccattgagggcagacaggagctgtaaaatcgatttcgcgttgacaaaaccgcgaaagtggtgtatagtaaatcacacacaaagcagaaggaggcaggccaagtggcaaaaacagaatttaaaacgattgcccagaacaaaaaggcctaccatgactactttgtggaggagacccttgaagcgggcattgagctttgcggcacagaggtgaaatcgctgcggcagggcagatgcaacttaaaggacgcgtggtgctctgttgtggacggtgaaatgctcttaaacggctgccatatcagcccgtatgagcagggcaacatctttaaccgcgatcccatgcgggtgcgccgtttgctcatgcacaagcgcgagatcatgcggctttttggcctttccaaaaccgtcggttattcgcttattccgctttccgtgtactttaagggttcgcgggtgaaggtgcaggtcggtctgtgcaagggcaaaaagctctacgataagcgtgccgatatggccgcgcgtgatgctcaacgcgatattcagcgtgcgctgaaagagaaaaacagataaaagcggtagcaatatcgctttttatatggggatgtaaaggtttcgacggggactggaagccctggtaagcgagtagcggtgcgggaccgctataaaatccgcaaacttaaaattaaacgacaacaatacagttgctgttgctgcttaattaagcagccgttcttacccgtaggaccgcggacgggataagagcgtcacttagcggtgcacgtgaacgggcccacgcctttaagcccgtcatgatctaaaggctactgatgcgcaaagcctgctgttcggcggtgcgcggagggaatgtcaaaagagccgctacactcgtagaaagccccggtaaccggttttcggacgcgggttcgattcccgccatctccaccagaaaaaaggtctttgtcatttttgacaaagacctttttcagtgaaattcgccttacggcgagtgaaataataacctgcggttattgtgaaattgcttcgcagtgaaatgcactgcgcgcgttaagggcgaatttaataacaactgcaagttgttttcacattgcgatgaaggagcaatatttcacttgacagttattaggtggatttactataatgaatttaagattaaagtcgcattttagatagtacttgcatatggaaaggagatatggtgatgaaacagtggccgtatcattttcaaagctctatgtcgaatgtattggtgatcgttgcagctttaatggcgattttcattgtgatttatggtttataccgaatattgcgtaacccttttcattatccatattttgtacgttcttttgatgtatctcggaagagaaatgtagatattgaagattatatagataagtatttgtgtagtgaatttggctggaattgtatagtggaacatcataatacgatcataaattggaagaaaagaacggagagttacattcaaacttgtgtattgaaaaagaggcgtactcgccagttttatgaaatcatagatgacaattttgcttttcgctttaaaacggttagagatcaaacaagatacagacagcaaaattacgtgaagacatcctataaagtgtccgtgcttgattctgaaatagctgttgattgggactggcttgtacaacgtcatagaaaactagagagaatagggtttgaagcgacactgaaagaataccacagtcgagatcagcggcgacagatgacaaaagagttacgccaacagatcatgaaacgggatcactatacatgtcaaaattgcggaaagtacatgccggatggagtaggactccaaatcgaccatattattccgatttcaaaaggcggaaaaacggttgcttctaatttgcaggtgctgtgttcaaaatgtaatggcagaaaggggaatagaagaacgacataaagaaagaacacaaatcgtgaacagttagtttaaaacgatttgtgttctttttgtttttaaattaaaatataagcttttttagtttctctcaaccatcgctctcaaaagttcaatttcggctttgtagccggggagttcgtttggagtttcgagataaaaggggaggcggcgcaggacagggtggttgatgatgcggcggaacgcttccgtgccaatcttgccctcgccgatctttgcgtggcggtctttgtgagaggaaagcccgaagatgctgtcgttaatgtgtaccgctttcatgcggttaagcccaatcacgcggtcaaactctgtcaacacaccgtcgaggtcgtttacaatgtcatacccggcatcgaacacgtggcaggtatcaaggcacacgcccatgtggtcggaaagcgttacgcggtccagaatttcacggagttcctcaaaatgagagccgacttccgtgcccttgcctgccatggtttcgagtaaaaccgtggtggtctgttcgggagataaaatggcgttcagcgtttcgctgatctgtgtgacgccggtctcgatgccttgtccaacgtggctgccggggtggaagttatagagattgtgcggtgtggcttccagacgcttcaaatcatcctgcatcgtttcgcgggcgaatgtgcgggtgtcttcgtttgcggagcagggattgatcgtatacggtgcgtgggcgagcagcacggcaaaatggttttccaccgccaactcgtttaacttctgtgcgtcgttcagatcaagcggctttgcgcggctgccgcgcgggtttcgcgtgaagaactggaacgtatctgcgccgatggaaagtgccgttttgcccatggcgtagtagcccttagaggcagaaagatgacaaccgatgtgcagcatggcttattccttggaattccagtttttgtagatctcttttgtggaacgcaccatttcctgcgcaaaatcggaaacatatttgcggttatagaacgcctttgtgcggtcgtttggcatcatttcgagcagctcttcttcagaaagctcacgataccggttctcaaacacgatggagctctttgcaaaacgagttgtctgctttctttccttttgctgctgggtgggatagccgaagaccagcatgcaaagcggcgcgacctgcgggggcaggtttaaaagctctttgtgaatctcgaagttctccacaatatcgccgatatagcaggaaccgatgccgaggctttccgcggcgatgcaggctgtgtgtgcggcgatgacggcatcttccgttgcaagcaccatgttgctgagctccggcgcgggaatgtcctcgcagcccgccattttgaactttctgtaccaacggtggtaatctgcacagaaaatgagcaccattttcgcctgtgcaatgaacggctgatgatcacaggtttcggcaagcttatccttaatggactgatccgtcacgtcaatgatggagtacggcatgcagttgccgccggtcggtgcgcgcatggcagcggcgagaataatatctttgatttcgggtgtgatctctttatcctcaaaaacacggacggacttgcggttcatcaaaacctgaatcgtttcattcatttttaagaccccttccaaattgttgtaatcaagctgctaacagtatagcacaataaagcatccgtgtaaaggagaatattgaaccgaagtgcacgggaaaacggcactatgggttgacaaatttaacagcggggttataataatatcaaagaggtgtatgaggagtgcggctatggaattgcatgaactgatgagaaagttacataagctggagcttgtgcagcagcttgcacatcggcgtggggcgcaggagcatggcctgtatttcggccagatgcctgtactggatttcgttgcggcaaatcccgggtgcacacaggtgcaggtggcagaccatctgcgcgtcagcccggcctccattgcactctctacaaagcgcttgcagaaggcggggtatctcacaaaagaagtggatgcagaaaacctgcgctgcaagcggctttatatctctgaagaagggcaaagggtctgtgccatgtgccgcgagcggttagaccagatcgacgcggtggcgtttcagggcttttcggaagaggagcttgaagcgttttcctcttttttggaccgcgtgacgcttaacatgacgggcgagaccgaaaatgttgtgagcggcgaattgttcggccatttgtgccgggaactcgatgccattgaaaaagaggcgaagaaaagctgattttctggtaaagttgtgttttttaccatctgatttgcaaaaaatatcaaatacattcctgcgctctttcattataataagggcgtaaacacagaggcgataccacaatgccggtcaatcgggcaaaatttcacttcgataatacatacgccggtatggatatgctgtacgggccatatgttctgtatcagattggggacttaagctgcgaagcaggttaccagacctttgagcacgagcaggcggtctatgagattacatacgtgctttccggtaccggtgcattttatgtagatgatacggtgtacaccatgcagaagggtgatctgctccttgtgcgcaagggacagatgcacaacatcatctcggcggagatcgaaccgctgcgtttcttttatctcggctttgattttgtggagccgatcgtaaatgagaagattgcacagcttaagagtttttttgatacgaacgagcaggtgcagtttcataacgcggtcagcttacaggacacgttcatgcgcgtgctttccgaattcatttcggacgacgtactctcgaaccttttgattgaagcgtatatgcaggagatcatctgcggcgtataccgcattttcagccggaagttctacaaaaactacttactgagcggcagcaataattccgatgaaaagctcgtctacgatgtcatcaattacattgatgtgcaccttgagtccatggaaaatctcagcgcgctcagtgcggagtttgggtacagttatacccatattgcgcagaagttctctgcgtttacgggcgaaagcctgaaatcctatcacacaaagcggcgctttgaaaaatcaaacgagtatcttcgccagggatattccgttacaagagtcgccgagttgatgggcttcaaatcgatccatgcgttcagccgcgcctacaaaaaatatgtgggcatggcgccgcgtgaatataaaaaatgggccgaggaggataaaaagaaccttccgcagcccgcagaaaattcttaaaggagttgtattccaatgaaagttgccattattggttgcggtacgatcgcaaatgcagcgcacatcccgtcttacatgaacaacccggaggcagaaatcaagtatttctgcgacatcatcccggagcgcgcacaggctgccgttgaaaagtacggctgcggcaccgctgttgtggattatcacgatgttctggcagacccggaagttgaagctgtttccgtctgcaccccgaacaatgttcacccgaccatttccattgacgcattgcgcgcaggtaagaacgttctgtgcgagaagccagctgcaagaacctacaaggaagcccttgagatgcagaagattcagcacgagaccggcaaggtgctcaatatcggtgttgttaaccgcttcaatgacagcgttaaccttatcaaaaagtatatcgacgacggcaagctcggcgatatctaccatgtacatgccagcttccgtgcacaccgttccattccgggcctcggcggcgcgttcaccacaaaggcgattgcaggtggcggtgctctgattgactggggcgtacattaccttgatatcgttatgtactgctgcggcgacccgaaggttaagaccgttacgggtgaagccttctgcgagcttggcaaggacatgaagggctacgcatacaccgacatgtgggcaggtcccccgaagtacgacggcacctacgacgtggacgactccgttgtcggcatgatccgtaccgaaggcccggtcatctctctgcacggcgcttgggcgcagaacatcggcgaaaacgagtgttacatcgacttcatgggcgataagggtggcatccgtctccagtacggcaaggatttcaccgtttacagctccgagtacggtgcactcacggagtataagcctgtctttaagatgcgcgaccacttccagaacgagattgacgcattcatcgactgcatcaagaccggcaagaagctgccgtctcacattgataccgttatcatcacggcacagatgatgcaggcgatttacgattcctccgagcagcacaaagagatcacgctgggctaagctccctgtggattaagaaaggaaattgcttatgtatcccttttctatcggcgttctgatggacggcttccgcaccgatacgctcacggctctcgataaagctgttgcagtcggcgcgaccggcattcaggtttacgcaacaagaggcgaaatgtcgcccgagaatatgaacgcagaagcacgccgcgaatttttgaagcgcgtgaaggatcacggcctgacgatctctgcgctgtgcggcgacctcggccacggcttcaacgacccgaagctgaacccggagctcattgaaaaatccaaacgcatcgtagaccttgcaaaggacctcgagaccgatgtgatcacaacgcatatcggcgttgtaccgaacgacccgagtcacccgcgctatgcaatcatgcaggatgcttgcggccagcttgcggcgtatgcagactccatgcaggcacacttcgccgtggagaccggcccggagattgcaacgacgctgaaggggttccttgacagcctccattccaagggtgtttccgtcaaccttgatccggcaaactttgttatggtcacgggcgacgacccggtgcaggcggtctacacgctgaaggattacattgtgcacacacatgcaaaagacggcaagcgtctgcattatgtcagcccggagatcctgtacggcatggaggaatccgacatgctgaacgacgcttccttcattgagcttccgctcggcgaaggcgacgttgatttcccggcgtacttcaaggcgctgaatgacatcggctataagggcttcctgacgatcgaacgcgaagtcggcgacgaccccgagggtgatatccgcaaggcggcagattacatccgcagcctgatttgattttaaaaagcaaagaaggagaacggtttcgaccgctctcctttttgtatcataactttttgctgcgtccgacgcatggcccaacggtgttttacgtgtatgccgcaacggttgaaagcgcggatatcccaatcacgctgcaggcgaatgaaacgattgattacaaatttctgccgtatgacaaattctgcgatttcatacagtccgaggcgtttgccgactccatacgggagcgttttccggcgtatcaaaacgcgctcgaaacacatgtaaagcaagttttgaaaggcgcaacttgcaaaaaatgacggagaaaaaatcaattattcatttgtgtgctttcctgttgaattttagtgtttgctgtgttaaaatctcagacggactaaaaacaggcggcttgcctgcaatgaggaaagttggcgtagtatgaataacccaatccaaaatgttaaagaaaagcttacaaagcaaaatttaaagacatttttgctcatcacgtttggcacctttatttttgccatcggcatttatttctttaaatttccgaataatttctccaccggcggcgtgagcggtatctctattctgctcggtcgtatttttccgtcgttctccacggcggatatcatgtggattatcaatatcatcctgctcatcgtcggttttatcattttaggacgtggttttggtgtgcttaccgtgtattgcagcatgctgctttcgtttttgacgtggctgtttgaaaaggtcattccgctttccaagccgcttaccgatcagccgttcctcgagctgtgctacggcatgatgctgccggcggtcggctcggcgatcctctttaactgcaatgcttcgagcggcggcacggatattgttgcgatgatcctcaaaaagtacacgagtcttgatatcggcaaagcgctgctcgtcagcgatgcgctcatcgcattttccgcgacgtttgtattcgatatccgcacaggcctgttttcgctgctcggtcttgctatcaaagcgttcatggtcgattccgtgattgaaggtattaacctttgcaaatatttctccattgtcaccacgcacccggaggagatttgcgattacatcattcataagatgaaccgcagctcgaccattgtggatgccacaggcgcgtattcgcatgagggctgcaaggtcgttatggttgcgtgcagacgcggtgaagctgtgaagctccgcgcgtatgtccgttccgtcgataaaaaggcatttatgttcatcacgaatacgagcgagatcatcggcaagggcttccgttctgttgaatgaccgtacataaaagcttttggcagcgcatcgtttcggtgtgctgcttttttataggtgaaaatttaatttagtattgacttaattaaaattcgtgctataatttaatttagcaaatacttaatcaggaggacgctatggggtcaacggctatgatgttcaaagcactggcagatgaaaaccgccttttgctgctgcgccttttgctgcgccgcaactgttgcgtgcgcgcactggcaagacagctggatatttcggaagcggcggtttcacagcatttaaaagttctgcgtgaagcggggctcattttcggcgaaaagtgcggttatttcatgcactacaccgtcaatcgcgcggcgcttaaagaactcagcagccagctctctcgcatggcgctttctgcagagcagttgccctgcacgccgcagcatggcgggtgcagccgtgcggaatatgacaaatgccgaaacgcggcacagccgcagacggagcatattctgcacgtagcagaaaataggatatttgatttgaaaggaagcatgaacatgaaaatcgcggtaacgtatcagaacggactggttttccagcatttcggccattccgaagcatttaagatctatgagattgagaacggcgaagttaaaaatgcagaggtcgcgcccacaaatggcagcggccacggtgcactggctggctttttgaagcagcacggcgtgaatgcgctcatctgcggcggcatcggcggtggtgcgcgcacggcgcttgcagaagcgggcatcgagttgtatcccggtgtttccggcagcgcggacgcggcggtcaattcgctgctgaacggcacactgctctataacccggataccgtctgtgcacaccatcaccacgagggcggtcatgactgcggcagccatagctgcggggaagataagcacggctgcgcgggcaatcattgatttaccggaagggtcatttcggcatttgctgcgatgacctttctttttctttacaaaccgcgaaactgtttgaaaacacgcgatttctgtgttatactatacgcagagtttgaaatttatctacgggaggacaagcatgtcgaatccgtacagagaggaatttatctccatttatacacagaatatcacgcgcgagggctcgcagaagcttttggcgtggctggataccaccgatttttacaccgcgccggcaagcacaaagttccactgtgcctgcgaaagcggccttgtgatgcacagcctgaatgtatacaaggcgatgcgcgagcgttggtttgacgagggcgacagtgaagaaagctttgcgatatgtgcgctgctgcacgacgtgtgcaaatcgcagttttataagacctccacgcgcaacgtgaaaaatgacgagaccgggcagtgggaaaagcgtccgttttacacggtggacgatgcattcccgttcggtcacggtgaaaaatccgtttacctcatcgagcgttttatgcgtctaaagcccgtggaggccatggcaatccgctggcacatgggtggctttgacgacgcggcgaagggaggcagctttgccatcagcctggcatttgaccgctatccgctcgccgtgaagctgcacatggctgatttggaatcaacctatctgcgcgaaaaaggcacctccgatgtgcgctgaggggcggtgagcagatgatcgcgatacaaactgcaaatttaacgaaaaaatacggcgacatcattgcgataaatggcgtggaccttgaagtggaagccggggagatcgtcggctgcctcggcccggagagatccggcaaaacgacactgctgcgtcttttaacgggtcttgtgcgcccgacgctcggcgacagcacagtgctgggactttcttctgtgaaagagagtcgcaaactgcgcgcgaaaagcggtatcgttaccgatacggcggcctgcattggaagcatgagcgctctggaaaacttgctgatgttcgcttccatgtatggcatgcgcaaggagcaagcccgtacacatgcggcgcagcttttgaagaagcttgacctttggaacgcgcgcgaccgcaaggtctacacgttttccacagagatgtgccgccggctatcgctggcgcgtgcgcttgtgcattacccgcagatcgtgttttcggacggtttgcccggcggcgagcaaacggtatcggacgcaatggtgctgcgtacactttcggattacgcaaaggaaaccggcgccacggtgttgctttgcaccgatcatcttgaaggcgcggaggaaatctgcacaagctttgcggtgctggagcacggctttttacgggcaagcggcgacctttcgtcgcttacggccgcttctgaattgacgcctatggcggtgattcgcgtgagcgacacgcagaagatgccggaggacttcacactgcatgatggcgcgtgggaaaagccaatcaaatccgaagccgatatgccggagcttatttccgggcttgtgcgggagaatgtcggcatttacgaagcatccgtgtgtacgcccacattgcaggatgtttattacgcgtttgtgaaaaagccgggagaggagacacagcatgaagaagctgttttataagctgttttccaaagcggaacgtgcactcatgatgaaggacctttccgctttgtgccgccgcaggctgatcttgacgttgctcatcgcactgccgctcgtttttgcggtggcgttcccgcttttgttcctgttcgtttccgctatggtctcaccgaaatcctccggtgtggagcagtttaaaaacctgctcgataacattccgcaggggacggacgagcgcgcgcagatgttctacattttcacggcgtttatctcgccgatgctgttcatgctcattccgcttttatcggcaatcattacggcttcgtacacgtttgcgggcgagcgggcacacggcacaatggaaacgcttctgtttgcgccgttcagcgtgcgccgctttttgcaggtgaaggcggcaagcagtattttggcttccgggcttgtcacggcggtttcatttattctgttctttgtcgtcacgactatcggcgatatggttttgaaagcgccgtttttctttgacctttcatggttcgttctggcgtttttgctctcgccggccatcacggtgctgggcgttacgtttgctgcgatgctgaccgtgaaagcacgctccacagcggaatctattcaaatttccggctatatcgtgctgccgattttgctcattttcatcgggcagatcatgggcctgtatcgcttaaacagtattgcgcttttgattttgacagcgatcgtcgttgggatcgacctgtgtttattcaacttcgggttccggcgcttcacagccgaaaagctgctgacgcgtccgccggaaaagccgcgaaaggagaaaaccaatgtctattgacctgcactgccacacaagatattcggacggctccacgccgcttgaagagcttatacagcttgctgcgctccgcggcgtgacgacgttcgcgctcaccgaccacgataccatggcgggctgcgaatgcgcgttgaagcttgggcgggaagcgggcgtgacggtgattcccggcgtggaaatttctgctgcagacccgaagcgtcacggcaaagcgcatatcctgtgctataagccgaagaagcccgaagtgttgctgccgctgctgcaaaaaacgacggacagccgccatgcggcgatgctacgttccgttgataaagtctgccgcctgtatgcgattccgcgcgagatgattctgcgccgcgcggagggctcgacgaatatctacaagcagcacgttttgcaggcgttaatggacgccggctacgcgagtgagatgttcggcgaggtttttaaaaagctctatgattccaaaacgggcatcgcctacgagaaggtggattatcccgacatcgataccgtgatggatgcggttgacgccgcagagggcatcgcggtcttggcgcacccgagcgaataccacagcatggatcttctgcgcgagctgtgcagaaaccaccgcatccgcggcattgaagtttatcacccgcgcaacacggaggaggataaagcggaaatgttgcgcttagccgaaaagtatgacctttccgtcaccggcggcacggattatcacggcttttacacgacaaagaaaaatccggtcggcacgttcacgacggccgaatccgaatttgataaattattttctgaatgaaagggaaatgcaaaatgaagtatgatttcacaccgaaaggtgtatgttccagaggcattcatgtagaactcgacggcgacgttattcgctccgtgaaattcgacggcggctgtaacggcaatacgcagggcgtggcagcgcttgcggtcggcatgactgttgacgaatacgtaaagcgctgcaagggcatcaagtgcggctttaagaacacctcctgcccggatcagctcgcgctcgcactggaagaagcgctcgcagagcagaagaaggcataaggaatttgctcaagagaaattacccggagagaaactctttccgggtttttctctgtttgggcttgatttttcctcagaatacggtataatagtttagtcaacaaaatatgcgggtatggcggaattggcagacgcgccagatttaggttctggtacttcggtgtgcaggttcaagtcctgttacccgcaccataatcggacaccaattgtgatacaataggtatcatgattggtgttcatttttctcaataaatgtgtaggagggaataaagtgaaattaaatgctgcgataaaaaatatgactacccaaattgccgatgttctttcgcttaacgatccttctgtttacatttatggttcttatgtgttagatgattttcaatacggctggagcgacatagatattctcgttctaacccaaaagtctatttccgaacaacaggctaatgaacttgtttgcctccggcagagtattactgccgccgagtccgataatccgttttaccgttgctttgagggtggcatgttgacactaaacgcatttattcgcaaggttccgggtagagttgtctattggggaacaagtggacaaagaattactgacagctatcattttgatgcgtgttgcatgaaagaactgcttgactacagccgtctcttgcatggaaaagacatacggggacaattgactccgccttcttttgaggacataaaaacaaatatacaatttcattacgatacgattcgaaaatatgcaagcagtaccggacgaagtatctattcttttggttggcttttggatattgccagatgcatttacacacttcgtaccggaaaaatcatttccaaaacggctgccggagagtgggcattgcaaaactgtttattccacaacatcaccgcacttgaaaccgccttagaggttagaaaaaatccgcaaaaatatttggaaagtgccgagctgcaggctttgtcggggaagctaggaaatgctatacagcagtatgcggacgtgcttgagaaggaattaaaaaccacatcatttgttggggtgtgcactttttaacggtactcggcaccttttaacgaaaggtcgtaaggggtgtgcattttgtatcaaagtaggtcactattttcataaaaacgagtgtattcagaggctttggcttttgtgttcactcgttttttatatgccatatatatgacacgatcggccgaacggcgaagcggaaatcagagaatactatgaaatggcaccgggtatcgttgaagctatcaatcgaaaatcgaacgcccaagaaatctggaacgaggtatataaagatctcgttgagccgtgtgtgaacatgattcataacaataaaaatgaaagtgcttatacgctttataaactttattctctgaaattgaatcaaaaatacaaagcataagaatcaaaaacagaaggtcaagccggataagagacttgaccttctgttttaatattctttaatattcgtatttatagttgcctaaaattatttcgcgttgaccgcttcctcgatggcttccagaacggtgtcgtagtccgcttccgtgacgagaagggagatctcgacttcggaagtcgtgatgaggcggatgtcggcgtcgcttgcggcaatggcgctgaacactctggcggccatgcccggcgtgtttttcatctgcgggtcatagacggagattttatggttcacgctgctgacgataaccttgatgccggtctcggtcttgagcgtattcgcaaaagacagcacctcgatgaggtcttggtcagaaatggtaaaagaaaggccggcatttgcaccgtggttcgggggcatggagatcatatcaatgttgatatcgagctccgcgatgcgctcgaatacctcagccataaagcctgtggtggcggggctgccttgcagggtgaccagtgtgatgttgctgaccgtgctgatttcggttgtgcccatgatctgttccatcctttcttaaaccaaagcggacatgtcgtaaaggccggggcctttgccgctcatgaataccgctgcgtttactgcgcccaccgcgaacagctctttggactgcgcggaatgggagagcgtgatgacctcgttgttgcccgcaaagatcacctcatgctcgccgacaatggtgccgccgcgcacggagtgaatgccaatctcgctcttttcacgctttttgcgctgtgcgtggcgatcgtacatatactgcgtttcgccgtcgcgcacggaagcaagcgcatcggcaagcatcaaagccgtgccgctcggcgcgtcaatcttctgattgtggtgcttttcgacgatctcaatgtcgaactggtcgccgagcacctttgctgccttctttgcaagctccagcatcaggttaatgccgagtgacatgttgcgggaatagaagattggctgcgtttcggaagctttggtaagctccgcggtttgctctgctgtgtagcccgtggtgcagagcacagccggaatgccacccttttccgccgcgtagtgcaaaatcggcgtcaaaagggaggggtgggagaagtcgatgataacatctgccgcttccgtcacctgatcgatggaggtgtaagcgggataggaagcagtctgtgcattgacgttcagatcaacgccggcaacaatctcgcaatcggtgcgttcggaaacaagctgcgtgatgaagtgacccattttgccgcagcagccacataaaataatccttgtcattttacgtccgttcctttcttaatcaggcgagctgcagatgctttgctatttcgactctcagctttgcaatctgctcatcggacatatcggcaagcggcaagcggcagtggccgcagttgaaacccatcaggttcaatgcctgctttaccgggattgggttgacgtccatgaacagtgcgttcatgaggtcgagatacttaaacgtgagtgcctgcgccgtcttgaggtcgcccgcaacggaagcggtggcaagctcgtgcatttctttcggcataatgttggagaacgtagagatgacgcccttgccgccgagagacgcgatcggcaaagtctgcgtgtcttcaccggagtaaaccgtgaggtcatcaccgcaaagctcacgcgttttgatgagcgcggagatgtcgtggttcgcttcctttgtggcaacgatgttctgcgtcttcgagagctcgtagtacgtttccggcagaatgttgaggccggtgcggctcgggacattatacacaatgcacggaatttttacactgcccgcgatgcggttgaagcttgcaacgaggccgcgctgggaagtcttgttgtagtacggcgtgacaagcagaaggccgtttgcaccgagtgcttctgctttttgggagagctccacggcgtaggcagtatcattgctgccggtgcctgcgatgaccggcacgcggtcggcaaccttgtttacggtgaactcgatgaccttcacgtgctcttcatcggtgagcgttgcagcttcgccggtggtaccgcaggtgacaatggcatcggtgccgcttgtgatctgaaactcgatgagcttttcaagctcctcgtagtttacggacatatccgggttaaacggggtaacaagtgccaccgctgcgccggtaaaaatggtttctttcatctaaaaaatacctcctgaacggtatcagtcaaaatagcccttctttgcgagcagctctgcaagcagaacaccgccgcctgctgcgccgcgcagcgtgttgtgggaaaggcaaacgaacttgtagtcatactgggtatccgggcgcagtctgccgatggaaacggccataccgtgctccagttcacggtcgagttttgcctgcggacggtctgcttccgtaaagtagtgcaggaactgcttcggtgcgctcggcagctcgagctcctgtgccgggccgcggaactctgtccagcggcggatgatttcctccggtgagaccttcttttccatggagacgaacaccgcagccgtatggccgtcggaaaccggcacgcggaagcactgtgccgtgatggacggggtggccgcgttgacaatcttatcgccctcaatgtggccccacagcttcatcggctcctgctcggatttttcttcctcgccgccgatatacgggatgacgttgtcgagaatatcgggatacgtttcaaaggttttgccggcgccggagatggcctgatatgtgcaggcgagcaccttcgtgacgccgaggtccatcagtgggtgaatagccggaacgtagctctgaagggagcagttggactttacggcgataaagccgcgctttgtgccgaggcgctttctctgtgcgttgataatctcaatgtggtcggcgttgatctccggcacaaccatcggcacatcctcgacaccgcggtttgcgctgttgttggagacgaccgggcactcctttttcgcataagcttcttcaagggcgcggatttcgtcttttttcatatcgacggcgcagaatacaaaatcaaccttggagacgacttcgtccatatctgcaacagcgtctaagatgatcatatccgccatacttgtgggaatgggcgttttcatagcccagcgcttttctacgacgcttttatatgttttaccggcggagcgggaagaggccgcaagcgcggtcacgttgaaccacgggtggttttcaaggagcgttgcaaaacgctgaccgaccatgcctgtgcaaccaatgataccgacattatactttttcatttctttcacccgtcctgtttgcaggacatcctttcaaaaatgatgaaatgtacgctcaaaaacaaaattaaggtcaaatttcatttttgagcgaaaaaaaaccggttgaaatccggtcatacatacaatataatagaatgtgcacaggcttttacgaaagtctccctgcggaaaagctctgatagcactccatcctattgcagatgacagttacggggctttcgccacagcaaccagatccaagcgtaccacatgcgctgagatcttcggcggtgtgtcctttttctgcgggccgatgcctgtggagggccaaaacccgcggatacttttacaaaccgcgcctctatccttattataatacatggaatacggattgttgtcaatttatttatgaaaaattcttagaataatcctgcgtaatttgggggatgcggctattttaattcagattggaaggaatatacttggatacgcaaactttacagacaaaagattttgattttgagcttccggaagaacttatcgcccagacgccgattgaaccgcgtgacgcttcgcgcctgatggtgttggacaaaacaaccggtgagatcgaacacagacattttcacgacatcacggagtatttgaatgagggcgattgtcttgtactcaacaattcccgtgttttgcctgcgcgtatttacggcattaaaaacgagaccggcgcgcacgttgaatttttgcttctgaaaaattgcggtgacgacgtatgggaagcacttgcaggtccgggcaagcgtgcaaaggtcggcacctcgttcacgttcgagggcagctccatgacctgcgaggtcatagaagtgaaggacgacggcaaccgcatgatccgcttccattacgacaagggcacgaacttcttcacggagctggataagattggccagatgccgctgccgccctatattaaagaaaaactcaaggataaagagcgctaccagacggtgtattccaaagaggaaggttctgccgctgcgccgacggccggtctgcactttacgccggagctgcttgatgcaattcgctcaaaaggcgtgaaggtcgtgttcgtcacactgcatgtcggccttggcacgttccgcccggtgagcgtggataacattctcgaccacaaaatgcatagcgagcattatcacatgccgaaagagactgccgacgccatcaacgagacgaagaaaaacggcggacgcgtgatcgctgtcggcactacgagctgccgcacgcttgaatctgtcgcaaagaaatgcggcaaaatttgtgaggacgatgactggacggatattttcatctatccgggctttgaatttaagggccttgatgcgctcatcacgaacttccacttgccggaaagtacgctcatcatgctggtctccgcgcttgcgggccgcgaacacattttgaatgcgtataacactgccgtcaaggagcgctaccgcttcttcagcttcggcgacgccatgttcatcaaataactttgaaaggaattttctttacatgtacaagcttatcaaaagagaaaaccacgcgcggcgcggcgagctccaaaccgtgcacggcacggtgcagacaccggcgtttatgaacgtcgcgacggctgcggcgattaagggtgcggtttctgcttacgaccttaaagatattaaatgtcaagtgatgctctccaacacgtaccacctgcatctgcgcccgggcgatgacgtggtgcgcaaaatgggcggcatacgcaagtttaccggctgggacggccctgtactgacggacagcggcggatttcaggttttctcgctcgcgaagctgcgcaatatcaaagaagaaggcgtgacgtttgcgtcgcacatcgacggccatcgcatcttcatgggcccggaggaaagcatgcgtattcagtccaacctcggttctaccatcgccatggcgtttgacgaatgcgtggaaaacccggcggaatacgactacgcgaaaaattcctgcgcacgcacagcacgctggctgcgccgctgcaaggcggagatgaacagactgaatgcgctgccggatacgatcaacccgaaccaaatgctgttcggcatcaaccagggctgcacatacatcgatctgcgcgtgaaccacatgaaggagattgcggaattggggctcgatggttatgccattggcggccttgcggtcggcgagccggcagaggtcatgtatgaagtgattgaagcggttgaagagcatatgccgcaggataagatccgctacctgatgggtgtgggcacgccgacaaatattctggaagcggtgcaccgcggcgttgatctgttcgactgcgtgatgccgagccgcaatgcacgccatggtcatgcatttacaaatgaaggcgtgcgcaatatgctcaatgcgaaatacacgctggacgatcaaccgatcgacccgacctgcgactgcccggtctgccgcaagttttcccgtgcttatattcaccaccttttcaaagcgggggagatgcttgccatgcgcttgacggttatgcacaatctttatttctacaacaatttgatggaacgcattcgtaacgcgctcgatgaagaccggtttgaagcattttatcaggagtattcagagaaatttaacaaaagaatttagaaaatccttgcaaccacgaatggcttttgttataatgtataaagttaatttggtgacgggtgtattgaccgctttgcagtcgaacggagcgcaccatgaaagaaaggaaagaaaaccatgaatttgagtgttttgacaacgacaggtgcagcagccggcggcaacatgtccagcatgctgatcatgctccttgtttacggtgcgatcatcgcggctatgtacttcatcttcttccgcccgcagaacaagaagaagaagaaggaagcggaaatgcgcaagaacgcacaggtcggcgacgagatcacgaccatcggcggcatttgcggcagaatcatcgctgtaaaggatgagaccgacagcgttatcatcgagaccggcagcgaccgtgcaagactgcgcatcaagcgttgggcgatcggcagcgtcgataccatccacgaggaagacgcgtaagtttcactctttttaaaggcgaatagttttgagccccttggaataagtatgaaacaaaacttatttcaaggggctttttctatgctgaattttaagaagctgtttttgggtttcctgttttccgtgctgttttcggctgtgctgatcgcggtttgtgcctttatgattttaaagctcggctttttgccgtccgagcctatactcggtacggctgcggcggtgatcggcggcgtttccgtttttgcttccgctttccttgcggcgcgcctcgcgggggaaaaaggattgctgcacggccttgtgcttggcacgctctatgcagtttcctatgttgcgataagcgttatgctgtatgcaaatatgcgggttgtacttcttgttatacggagcgtaatatttgtgatatgcagcgtatgcggtggagtaatgggtgtgaatagagatgaaaaaatcagattttaagccataattttgtagcttctaatcaagggcgcaagaacgattttgcatatttattcacgataacttgtagcaaagcagaactgcatattcataagtttacataagattatagacataaatttgtgcagatgcaaaaatattcacgaaagcccttgcaaatttggctaaaaagtattatagtatataagacagaagtgaggtggcgtatcatgaaaaacggcaaattgggctttatcggcataggaaacatggcgtccgcgattattggcggtatcttatcttccggcactttcccggtcggagatatttatatgtacaatccgcacgcggaaaaaatgcagcgctttacagaatccggctgcgtagcctgtacttctgccgaagaagttaccgagctttgtgatacggtgttcctttgcgtaaagccacagattttcccggaggtgctgcgcgttattgcgccgaccgttgcgaagaagaatgctgacgatgttgtcatcgtttcaatcgctgcgggcgtaacgtttaagaatttgcaggacgcgctcggcgcagaccgccgctacgtgcgtgccatgccgaacacgccgctgctgctcggtgagggcgctacggcgctgtgccggacaagcaatgtgccggaagaagactttgcgcgcgtgcgttccgctttctcctgctgcggtgtcacgcaggagattgacgaagcgcagatgaatgcggtgattgcggtcagtggcagctcgcctgcgtatttgtatctgcttgcaaagctcacttgtgattatgcagcgcagcagggcattgacccgaagaccgcgcttacactgttctgccagaccatgaaaggcagcgccgatatgcttttaaacagcggcaaagacccacaggcgcttatggatatggtcacgtcaaagggcggcacaacatttgctttgctgaatgtcttgaaagaacagggctttaatgaggcgatgatcagctcgtttgaagcctgcacgcaccgcgccgaagaactttccatgtgagtgtgcaaggcataacacggcgatgcttcacatatagattgaccatcttttataggtggtgaacgaaaatggaagcaaagccgaaatatgcaaaaccacgtagcctatctgttttaatggctttgcgcattttgttcctgctcggctttttgttcggctgcttattcgcacggacatcgcaaatagctatggcgccggtttccggctctgtgtggtttagggggccgtttgaaacgggaacggactttccgtttgtattttccgcatttttatttgattcgcttttttacgcattgccgatttttttatttggcatgacgtttttgggtgtgcttgtgattcccgctgcgataattctgaagggcttcacgcttggcacgtcgcttacggcactgattcggcttgagggtatcggatcgtattttcggcggtgctttgattatctgccgatgacaatgctgtgcatcacggtgcttttgctgcttgcggcggaagcgctttgcacggcaaggcgcagctgtcgggtgtttttcggaaacggagaaccgctttccgtaaaaaactgcaccgtgcggtttttgcttgcgtttgcggcgctggttttcatttcgattttatacggtgcattgcactttttgattttgcaaatttagattagattttaaagcaaaggaggccgaaatgaatgaacatggatgaatacttcgtgctgtttcgcgagtacatgctcgtgcagaaaccgagttccgtaaatacgcgggattcttatctgcgcgatgtttcggctttcctgcgctacttggagggtgaaaatataacatctccactcgaagtggaaacggagacggtggaagcgtatgtgcagcatttgcacagcttaaaccgcacaaattccacgatctcccgcaatattgcctctgtgcgttgcttttataagtttctcatcctgcgcggggatatgcaggtgaacccggcgaaatccgtaaagcttgaaaaagagccgaaaaagctgccgcagacgctgacaagcgaggagatagacctgctgctttcccagccgaatgtcacggaagctaagggctgccgcgataaagcgatgctggagcttctttatgccaccggtattcgcgtcagtgagctcatcaacctcaacgtgcaggatatcaacctgcgcacgggaaagctgttctgccgcggcaccaagggcgtgcgcaccattccgatttatgcgaaagcggtcgttgctgtgtccgattatctttaccgcatgcgcgatttgatcgtggacccggacaacagcggagacgcgctgtttgtcaatctgaacggctcgcgtttgacgcgtcagggtttctggaaaattatcaaggcgtatacggcggaggccggcattacgaaggagattacgccgcacacgctgcgtcattcgtttgccatgcaccttttgcagggtggtgcttccgtaaaagacattcaaaccatgatgggacatgcagatatttcgtccacacaggtatatgttcatttattagaccttgataatcacgtgaaaagcgtgtataatgagtgtcatcctcgtgcaaaaacgagttaatctaattctggagttgattttgtggcatttttaggacttttcggtaattatgataagccgggtccgggcgttgacaaagatgaaccgaaaaaggcagcgccggtacgtttttttgagatcttgtggcgaaagctgtctaaactggtgcagttgaatctgacatttatgatcccatttattgtggtcatcgcgttgatggtgggcgtatttcttttaccggttccgcattttctttatgcaacgtcgttcttcggtgtgcttgacctgtacattctgtatgcggttacactgccgctcatcctgctttcgccgttcacatgcggcttagcatatgtaacgcgaaacttcgcaagggaagagcatgcgttcgtttggtcggatttctgggacgctgtgaaaaacaactggaagccggcacttttgaacggcgtgatcgtgtatctcgcatatgtaatcttgagcttctcaatcttcttttattccacacgtgtatcggacaactggatgtttatgattccgcttgcagtttgctgcatcctgtcgattctaatgctgtttgcgcagtattacattccggttatgatcgtcacgtttgacttgaagctgcgccacatttacagaaacgcgtttattttctctattatgggtctgttgcgcaacctgatgattacggcaatccttgcgggtttattcattgcgtttttgttctgcccggcggcatttgcagtgatcccgctgctgctcgtaatcattttcctgtgtgcgttcatcagctatctgacgagctttgcgacgtattcgttgctcgatacgtacctgatccagccgttctacaaaaaggaagcggaagcgaaggacgctgaaattcgcgtagccaaagacggcgatacgttcaatttcgacaatgatgagttggacgacgatgacgacgataagccgcagtatgtgtacgtgaacggccgcttgatcgaccgtaagatcatggagcaggaatctctgttctcggataaaacggatacttccgatcatttacagtaatttaaaacaaacataaaagcctctatcgaactgaaatcgatagaggctttcattttgctcaatttcaattatttctcattcttatcagtcttttcacgcattttggaaagtgggttggcgtttacggcttcctccatttgcttgctggaggtgtgcgtgtagatctctgtagtgccgagattttcgtggcccagaatatcctgcaaaacgcgaatatctacgttgccgtattggtacatcagcgtcgccgccgtgtgccgcagcttgtgtacggagtatcccgcgccgccaagaccgattttcgtgaggtatttattgaccatggcctgtacggtcttaggactgatgcgtgtgccgcggttgctgatgaacagcgcgtttttatccttcacgtcgtcctttgggcgcacacgcacgtagccatcgatagaagctaagcatgcgtcatttaagtatacgatgcgttctttgctgcctttaccgacgatgcgcagggtggagttgttgtggatcacgtcgctcatgttgatggaaacaagctcggaaaggcgcatgccgcagtttaaaaacagcgtcaaaatgcaatagtcacgctctttatccggcccgtccacggcgtttaaaagctcgcggctttgctctaacgtgaggtagcggggaagggttttggcttttttcggcggggtcagattctctgtggggttagaatccaaaagaccctcgtgcacggtcaggtagttaaaaaagcttttgagactcgaagattttcgctgacgcgtggagctcatgttgctgcgtccgtcggcagcgtagttcatgaattcaaaaatgtccatcgtcgtgatggaacggataaattcaaggtcaatatcgtcgattggaatctcctccatgggcgtatcttgtgaaacatatccgcgaaaatgtttcatgaaacgaaagaatgtccgcaggtcagagcagtattcgtttacagtcttcggcgcgcggcctttgatgttgcggtaatataaagcatattgccgcacaatctccggcatttcagacaaaatatccataacgggtacacctcacaaattttgaattttaaagccgcagcttggtgttcggctccgttggatgcaaagctttcggatttggcctaatcggtacttgaatttactcttggattatcattataattcggaacgagacgtatagatatgcttgcggtacttaaaccgacagcagagtaaacggagccgaggtaattaaaaacaatctaattgagaaacgcacggatttccgcagtcgagagttacaaagaatcaacgcacacaatcacaattcataatgaatgcgtttatttaagtaagctgaaaccaaaacataagctgaaaccaaaacattgggttgggctaaaacggatgatctcgcagattttacgaaaacccgcttgaaaagtcatctatttgtaaaatgctgctccccaaattatacaaaatatctattttgtataattttgatgagctaaacgacccttcgggtcgccgcgcgccaatgcccgcctttaccacctttcccacaaaatcgttgacaaacgcgactacctgtgttaaaatggtaaccgcagaaagaacatgagaacagcttaccacaaaagagcttggttgtaaacccctcggtggtaagctgttcttatttttttgccaactggtcagcaagcgcgtacagcatcgccacggcttcatcgctatggttcagcagccgctgcacgcgcttaatgtcatggtgcgcatgataatcctgcaccgcatagattttgcgcgcgctgtgcggcgctatgttgcggcgtatcggcttaccgtcaagcctgtaaagcttggcaactcgccgcaagtctttgtacaccgccgcgcgggttcgcgggcggcgctcatccaaccgcccctcaaaaacaaaaaaacgcccagcctgtttcaaaaggcggtcgcgcagctcctgcggtatgtacaccctgcggtgtttgtgggtctttttctcggtgattgttgggcggtttgaccgtttcagaacgtccgttcgcagcgcaaggcagtcagaaatgcgcagccccgttgcaaggctcagctgcaaagcaaggcgatttgcgggcattaacgccgtcagtagcagctcgaaaacccgcgggtttatgtagtcggttcgcacgtttttcgctccactctcctttcccaaaattgtcaactcatctgtgcccccaaccccaaggataaacaaaaacggcgcgattgtcaagcccaagcaaagcgacacatgcgtgtcgggcttgacaacctcaccgtttgagttaacaccgcagccagcacccgatgagccagcaacagcagacagagagagcatatttgtttcttgaggtgtcgtttttgcgctcacctcaaaggtatttgcattttaagccggcttgcagcacctcgccgttcgcggcacactggtcacccgataagcgatattcgcgcccttcgagcgcgtcaaaatcggcgtgctgatagatgcactttgcgtgcatcagagcgccgccatgataaaagtaccgcccgccaatcgtgccgccgtttgtgccgtgctgcttcgagatgtatttggctacatagtgcgcggcagcgtttcgctccccgcaaagaggtattgccgtagtaaaaccaagtctccaaccgggcagattatacaccgtttgccctttactttttttgccgctatccacaaggcgcacggaacttttattgcacagtccatgaaaatgtatcgccccgtctttatgcagctccggcaccgcaacgtatttgagcccccgccgccgcacctggttgtctgcccactggccgaatttgcgcacggctgccttgtagtcatatcggtcaatcaactccttatcaagggtcaacgtaaaaaagaggtcaagatcgttgcaggcgcacagctcgtatacttgcttgcgcgcgcgcgatgcagcgcgccgcacgccgtcctcatctggttcgcggcgcttgctcttcgtgacggaatactgtgcttgctctgcgtccatcttcacaagcccctcggggttaaacacgtcacgattaaatacgaggtcctcaagcacgtctcccgtgaggggatttatctttatacgcctattgcaaaacgacccctcgccgaccctgaataacctgttttccatttcgttttgacggaatactgtgctatatatcaagtagccgagccgcgcagatgcgcggatagacgcgccgccgtcaagccccccaaagtcacacaaaagcctttttttgtgcggttttgcgcaaagggcgcgcgcaaagtcacacaaaaaagcgataccttttgtgcggttttgtggggcagcagccaccgcttcggggcgggctgccgcccctcgggcgctgtctgcgcggcgctccagtccgttgccgtcagctgctcccgcaggggcgcgtggcgcacggtgcgcgccccgcgcccctctgccgtatttccccacccccccgcccctccatttggaggggggcgcagaaaggtgaaacccacctttgccgccgccctcgggacgtgtgcttgattatagcgcgcgcgggcttacgcaccccaaaactaccgcttaggctctgccacattccgcgcgccgcctgcgcttacaaaatagattgttttgtatcattcccgcgtttcgcttcgctcaacactatgagtacaaaacagctattttgtataattcggaatttttttagattcaagcccctttgtatgcttccgtgtgaatctgttttgaaatgtgcgtgtttgggtgctggtacatgaatacacaggcgtatagaattaagaattatgcatcaagctccatcagcggtaaaatgccgccgatgtcaatcatctggttttgcgtcagctcaatgtactgtacgcagtgcttttcgagaaacgcacgaatctccgccgcgcactctaaagaatcgagcttgcctgtgaacgccaccacatttttgtcgatcaggccacagcagccgcctaagaagccgtaatcgtagccatccagaaaaacgttttcttcgtgcacaagcagcacgtcgatgcctaaaaactgcgccagtgcgcgaatgccgagatccatcgtgatgatcgcgtctttcgccacaacagccgtcgcacagcgcgtgtagccttggttgacatgcctcattttaaggccggcgtcttccagacaggtgtaaatgttcggatccataacaccgaggtttgcaagcaccgtgccgttcaggtttaacatgttgcaaagaacatccttcggatatttgggctccggagtcatggcagtctccgctacctgatagccgatatccgtaagctgctttttgagtgcctcttctccgcgcagaacaaacgtgcgtcccttatccaaatgaaacatctgcatatctgcatggtacgcgatcggatccggcagacgcgtgtcaaactccgttgtgacgcaccgaataccatgcgcctttaaagcttccgaaatctccggatatgcgccggagaccgccgctgtcgtgaccttgctttccggaagattcggcttttcaacaaatcgttcttttactgcacacatgcgtcaaacgcctccctcacgttgtggacaccaatgagctccaccccgctgaatctttttgaatctatgctcttcatgctgtggtatggcagtacacagcgcgtgaatcccagtcgatatgcttccgaaacgcgggactcgatatgactgaccgaccgcagctcgcctgcaagaccaatctcgccgaatacgacggtatcatcgcggattggcgtatctttcaggcttgatacgagtgccattgcaacggccagatcgaccgccggctcatcgatgcgcaggccgccgacgacattcaaatacgcgtctaaattggaaaaatagaaacctgcacgcttttccagaacggccaaaatcagcgccatgcgcgcataatcaaagcccgtggacatgcggcgcggcgtgccgaagccgcttgtcgttgcaagaccctgaatctccgcaagcagcggacgtgtaccctccattacggcggttacgcatgtgccggaagcgttcgtcgggcggccggaaagcatcgcctgcgaggggttttcgatctgtcgcagccccgcttcccccatatcgaatacgccaatctcgtttgtggagccatagcggttttttacggcgcgcagaatgcggtacgtcatctggcggtcgccctcgaagtacagcacggcgtccacaatgtgctccaacacctttggacccgcgatggcgccgtctttgttgacgtgaccgacgagaatcgccgggatatcgagcgacttggagcagcgcatgatcgcgttcgtgcattcgcgcacctgtgtgacgctgccgggcgacgaattgagatcggtaaagttcatcgtttggatggagtcgatcatcacgatatccggtttttcggtgcgaatgtgctccaccacaagctgcacgtccgtttccgccaaaatgcgcaggttggggctggaaacaccgagacgccctgcgcgcagcttgatctgccgtgcagattcttcgccggaaacatataaaatacgcagcttttgcccgaggtattcgcagatctgcaaaagaatggttgatttgccgatacccgggtcgccgctgatgagcacgagcgagccttttacaagaccgccgccaagcacgcggtcaagctccgaaagtccggtgtgataacgatgctcgtcctccgtatcgatctctgaaattgcaagcgggcgcgtcagcagcgtagaagctgaagaagaatacccggaagcggcggattttgcggaaacagccgttttgacggattcttccatggtgttccactcgccgcaatccgggcactttcctgcccactttgcggattcaaacccgcagtttgagcagatgtagacgattttatttttagccgccataacgcgcaccgcccttattttgtataattctaagcctattttaccacggaacagatgttttgtaaagagttattccgctttgcaaaaggcgataatgccatccgcgatagccgccgccaatttcttttggtagttttcgtcgcacagcctttcagcttcttccgggtttgagaggaacccgcattccgcaaacacggcgggtacgtctacatggctcaaaatatacacgcggctttctgcctgcttacaggcgcgtgtgttatccggctgcacctgctcgatgactgcacggcggatggtttcggcaaggtcggcgcttttagcattatttgctgagtaaaacatctgtgcgccgctgtattgactttgctcaaaaaagttttgatggatgctcacaaaaatacagttctcagtttcgtttacgatctgtgtgcggtataaaatatcagaccgctttcgttcgtttaatgtgctcagtgtggtatcgccgacggcggtgtccgtttcgcgaatcattttcacggggtagcccgcagcttcgagcttttcccgcacaaacagcgcaatggcaaggtttaccgttttctcttccacaccgtttacgcctacggctccgccgtcttccccaccgtgccctgcgtctagaacgatcacggggcggttttcgatctgtgctgcggccacagataccgcatgtaccgcacccaaaacagagcacacaaaaaatgtcagagcaccgaggaaaaacaccacaggaatatacgcgattttaaaagacaaataccgtttcaagccgcatcacccatagatttttatgcattgaagctgccggaaataccctataaaaagtaaaaagctgcccgccgaaggaggcacttcgtaaggaagtgcctccttcggcttttgtaatcagccggaatgattgaattgtgggtaaaatcaatcacattggaggattacaaaatggacaagtgcatctacaacgagaaaaacgggctttggtatgagctgcaaggggactactatctgccctgtctgaaactgccggaggaaggcgaagtacatatcggcatatggggacaacagcacttgcggtatctaaagcagtatcacagagtgcgctactacaatctgctgacaagcggcaaattgaatgattatcttgttgatgtggaaaattgggcacagcagatgtttgatgaacttgtgaatgcactatctcgaaatgaaaacctgacggagggtttcaaggcgactaatccagtggaatgggttaggaaaagcaataacatccgaaatagggcggctgaaattgtaaatcaagaggttattttctcgtaatcaagtacggtgtgtgggcacatcccgcacgccgtttccatatacctcagccgagtttccgataatatattgtgcaatcgaacccatcttctatcttgcaagtctcaaaattttcttgaattctcgatttggacgtgatatactgatcttggaaagattgaatttacccttaatcataaggagatgaaaatatgccagcaaattacaaaaagctctggaagctgatgatcgacaaaaatctcagcaagactgaattgacgcatttggctgggatcagcactaacgctatggcaaagctggggcgcaacgaagatgttcgggtgaatgtgctggaaaagctctgcacatcactggactgcaagctggacgacattgtcgaatttgaaactgaacagaagaagtaacttgaaaggaaagggcgtgacaacatggcctatagtgccgaactctatgtgcacgacttggacaggcaagccgcagatgctttgaatcaattcccgaagtttgtaaagcttctggaatcgtattctgccaattacgatgagaaggctgctaaaattgaccttctatcgaccgcaatccgtctcggcgaaaaccagatgccggaggtatacggtctcttgcccccgatctgtgagcagcttggcattgatacgccggagctttattatgtgagggacaggcaggccaatgcagcaacatttggcagcgttcacccttgtatctatgtgacatccgggcttgtgaataaacttccgctcaatctgctccccagtgttctggcgcacgaatgcggccacattgcctgcaagcattccctttatcactccattgcagcgcagttggttggtggtatagaccgaagcccgttagcgcgtattccggccattggcaaatatctcacgccgacattagtgagggcacttctattctgggatcgttgcagtgagttgtccgcagaccgagctgctgctctctgtgacggaacagcggacaaaaccattgatgtattgctccggctcaacggctatggcaagaatgtggatcggaaagaatttctgaaacaggcgcttgacttaaaatcctttgtcaacgattcaaaatccaacaagctgatggaactgatgctggtgcaggatgaaacccatccgcgattggccacccgtgcctatgagtgctacgaatggtcccagtcagcgcagtacgcaggaattattgacggtacatttactttgtcagacaagacaaaagagatcaatcaggagttggcagaggatgtcgtatctgccgaggcgaaaatcgaagcaccaagcattgatcgcctgaacacggagctggcccgtgtcaatcaggagttggaacattataccaatcacgccgacaaggcagattatgcgtttgcggttgcaagcggcgttcttgccggtttagtggacagcttgtttgtcggagaattctcgcttgagtatgcaaatcagtggggaaatcagcaggctgaaaagttggttctaaaggttgcaaaatatcaaggctacagtggaaccgatcttggacaggctataaagcatctggaggatcagttccccattgccgcagacaaggcaactgctgcctttggcggaggtctgcaacaccatctccgtgacttctcgcaccacccgaccccgctgggactggtttgttccattttgacgcaatttacgggcaatgtttacggtaccgatgttgcgggagcgtttcagtgcgtaccgcttaacaaagatggcctgaatctcgtgggaaagagtttccccgaaaagattatgtttggcgctgtaaactggttctttcatatggtcagtgatgttgccgggtcttctggctctgttatgaaaggcagctttggcacggggctgccggggccgctggtctcccttttgaaggaattttcttcaactcgcttgttcaaaaagcaagatgctaaggggtgtaaggaattttccgtttacatatccaagctgttcaacggaacgctgctgggagaacgggacttaaacggcaatctgatccctcttaaatttgaccttcgcaccgaaatgggcgttgccatgcaagttgggaagcaaaccattcctgtgatcatcaacgaatgtatcgtgcggtcgtttttccttctgcgccggttgctgcaggaactgtccagagacgacattcaagactggagcgatgtccataaaatcaactggaaagccatcattcctttccgaaaccgcacagtagaccggatgctcaccatagccagtatgaccttcaccgtagccgatactgctgatgcggcgatccacgctgccatcgaatccggcggcaattgggtgctgttttccggtcgatttgttacccggtttaattatgtgggtgccgggtgtgctgctctttccatcgtgcgtgaggtatccaatgagaagaaggaggcgcagctcattcacgaaaagatgatcctttcggagacaaaggcggcactgttcctcaagcagcttcaggagttcaaggaacaactggacctgaaggtcagcaattatcttgccgaggacatcgacggctttatgtccggctttgctgatatgcagcaaggcatgctgaccggtgattctgattttgttattcggggaaatgttaccattcagaaggttcttgggcgagagccgcagtttacaaatcagaaagaatttgatgctctgatggagtccgatgctccattggtattataaaggaggttaggcagaagtggataagaagaaaatcggggcaggttttgcaggggctttgcaaaaagctgccgatgcaaccaaggcagctaaactggccgtgcaggatatggcagctgacgcaaaacaaagtcgggagaagagaaaagccgatgctcagaaggcggctgcggcaaaggaactaattgcagccgctgaatcggaaaagggcactgcgtcagtggtgaagagcattgctactcgaaacgcacttcaaatcatctactatctgatggcagcggacggaacggtttaccacagtgaggaggaaaagtttgatgccataggtgcagcgcttgaccctaattttgcagatagcaagcccgctatcatcaaggactgtcaggcacaattggagaagatcattgattcggaggactattacgatgttttgcaggacggcgtagaagatgcgattcagtcctccaacgaaacagctgataccttcatcacacccaagctattggtttgggatctgttgaccattgcatacagtgatgaaagctacgatgaaaccgagcgcaaactgctcaagtacatcgtccgtaagctgcaaatcgacaaagctgtttttctggaaatggaaagcagcatcctgacaatactggatattgaaaaagagattgcgtggatcaaaacgacagatcgtccgtacttgacgatcgaagcacgggtaaatgagcttgcaaaacgccaggcagtgatctttgacagtgtcaaagacttgatcacactttgatgggaggggaagaaaatgccgttaccgcttttgtttatcggtattgctgctgccagtggaatgttcgggatcggcggcaccgtaaaggccggctttgatgccaaaaatgccaagcagattaataagagtgccaatgagcttgttcaggagtccaccgattatctgaatgcacagcggctcgcctgcggaaactcactgacccagctgggggcagaaaaaatgaccgtcttgaacggaacgatttccgacttcttgaatgtgttcacacagatcaaaaatgtggatttcaaggagacggaaggactggatgaactccatcggcttcatattgacgagcaggaatttgtagaacttcgcagcatggcacactttgcgggctccgtagccggtggagcagttgctggaacagccggaggcgcattggctgccttcggtgcatatggtgctgcacaagcgctggcttttgcttcgaccggaacggcgatttctgcgctgagcggtgccgctgcaacgaatgccacgctcgcctttttcggaggaggttcccttgctgccggtgggcttggaatggccggcgggacagctgtactcggcggactcgtagccggtcccgccctattggttatgggactggttgccgggaaagcagcgaagaaagatcttgaaaaagcatacaccaaccgagctgaggcagtgcagatcgcagcgcagctcaacacggcatccttacaatgtgagaccatccgcagaagaacctgtgtgttttacaatttgctggctcgactagattcttactttatgccgttgatctaccagatgagcgacatcgtaaaaacagagggcgatgattacagttgttacggtgcagattccaaaaagataattgcatcctgcgccagtgtggctgtgagtatcaaatccgttttggatacgccgctgctgacggatgacggactgctgacagacgcttcggagggaactgcaacaaatattgagggttttttgaagaatctgaaaatcccatattgataagtgataacttttgcaaagtcggctgtcggaaacggcagccgactttcttactgcagtatgtcaaaatcacttgacgaacaagcgttctatatgctatactatattttgctctcatagcagagtccacaactgaatatctgaaatgaaacacaaggcagccgtcgaaagaaattgcggctgcgccgctcctgttgcagcgtctgcctgcgggacggaaaaagcagacactgaaggtttctgaatttcagagccggtacatagtttcatcaaagatatagcgagagatcatctcccgctgatttgatgtgctgtgtaccggctctttttgccgttatagacaccgttcaaacaattttgcagagggggttaattttcggcccttctcgctgactaccaattgaggggcaaattgaaaactgaatgaccgtccgaatgggatatgactgagcgaagatatgagcttggcgacgctgcggtgagattccggggcaggaatagaaaaacgacattcggagaaaacggcaaacaatccgcaaatttttcaagaaacagttccgttttacacccgtgatttctcctatttgtggggaaagctgctttacggtcaagaccgtaatttttcgcagatttctttttgtgggagcgccaaacggcctctgtatcgtctacggcgtttccgttagaaaatccgtgaattctgccggtcttgaacgggactttttccggtaaaaacgggccttctacaaatgcgatccgaaatgaggtgaaattcaaaatgattacagaaatcaagaagaaaaacaagctgaccgagatatggttcaacgaaaccggcagcgctgtcaccatccgtacttacaacaccgacctgaaaaatcgattggcggcgtatgcggcaaaatatcccgcccactgccgcctgactgacgatgacgagtgcggttgcctgacttttgagatagaccgtcggcggttctctgtccggctgaccgccccctattccgaggacaggcgaagcaaagctaaggagacgatgactgccgttaatcagcggagacagaagaacaatttcaagaagccgctatgaccgagaggtgctgtccacaggaataacgagcatcggattgtgacccccacaatccaaatccgcagccttacggtctgcggacttcactcaggggcacgcccctgaataccccactaaagaatggagatgacaaaatgaaagaagagaaagtgcgtatcaaggtacgcctgaccgaagaagaaaaaaagaaattagagcgaaacagcgccctgtgcggactgacccaaagcgaatatgtccgtcagctatgccggagtattcacccgaagccaaagcccccggatgcattttggcagctgatggacgagctatacaaggctcattccaacttgaaagaatgtgccaaatatgagccgtccgccctcaagctctgcgccgagattgaacggctggtgctggacttgctggaggtgatctaatggcaacgacttctctttggcacatcgaaggccgcttgaaggacctcatcgactatgtggagaatccagaaaagacggcatcgaaaacgccggagttacaagacctttacaatgtgttttcctatgtccagcgcccagaggccacgcaggcgggcgagtatgtcaccgccatcaactgcctgaaggaaacggcgctgcggcagatgatcctcaccaagaagcgttacggcaagacagacggctacatcgcctggcacgggtatcagagtttcaagccggaggaggtcacgccgcagcttgcccacgagattggcgtgaagctggcaaaggagatgtggggcgaccgctttgagattatcgtcaccacacatctggacaaagaacatctgcactgccacttctgctttaattccgtgtcctatcgggacggcggcaagtacaattattccaaagcagagcaacagcgtctgcgagaagcctcagaccgactttgccgagaatacgggctgtccgtcattgagaagccccacaaagccccctcccgtcccgtttggctggacgagaaaagcggcaagcccacccgctacaatgtctaccgtgccgatgtgcgggaggcaatggatttcagccgcacgccttactatatggaggactatctccgtcgaaaagggtatatcatcgactttacgggcaagcactggaaactccgcctgccccaatatgagcatttcacaaggttggatacgctggatgagcggtggacaccggagaatatccgtctcggacgatacgcttctttcggtaaccgcagggcgtatatcagctatccgccccaaatgccgcaggagctttcggattggttccgcccgttccataagaccagccacatctacaagctgtatctgcactattgctatctgctggggtacttaccgaagcataccgactacaagcccacaagcccctatctgaaggaggacttgcggaagctggatgagctatcccagcaggtgcggtatatgagcaaatacggtatcgaaacctttgatgacctgtatgcagaccgtgagaaaatccagcgggatatggatgccctcattgtccgccgcaccaagctgcaaaacaagatacgccgtgccacaccagctgaaaaggtaaaactacggcaggaaaaggcgggtgtgacagagcagatcactgccctgcgaaagcagctgaagctgaataaggctattgaggtgcgttccgccaaaatacaggaaaagacggatctgctctatgccaacgaataccgtgccaagaaagaacataggcaaaagaaatcacagagaagggagcgtgacgcacgatgagtgccgataacgaaatctatacacagcttgaccgcattacagaccaccttgcgacaatgaccaagcaggagcgcattgcgtggtttcggagaagcgcctatgtacagccgctgaatttcatcagagaaattgacggtacggtatatgccgtaagagcctttttcaaagaggacgcaagagaaaatattaccgacaaagtgcagcgtatcatcctgaaaagcgatgataatagcaaagaaatttgaagtcaccgcattaaagcgttgaagtttacggccggatatggtagaatgggcttacctacaaattcgatcatatccggctgtggaaaggagagctatgacaaaacaaccggataaaatcacagccctatactgccgcctgtcccgtgacgatgagcaggacggcctgtcagggtccatcaaaaatcaacaggctattttagagaaatacgcacaagaaaatggcttcaggaacacccgtgtgttcattgacgatggctggtcaggtacgaacttcgcaagaccggcgttcacggagattatggagctggcggaaaagggcctcatcggcaccctgatcgtcaaggatcactcccgcttggggcgtaaccgcctcatcgtgggacagcttctggaagaaggcttcgacagcctcggcgtccgctacatcgccattatggacaacatcgacaccgcaaagggcatcagcgaccttgtcccgatgcaagacctgttcaacgagtggcacgctaagaacaccagccagaaggtacgcaatgtgttcaagagcaaaggaatgtccggcgcaccgctgaccaccaatccgccctatgggtatatgaaagacccggagagcaagaacgggtggatcattgatgaagctgcggcaaagaccgtgcggcagattttcgcttggtgtgtggacggcctcggtcctacgcagatcgccaaacggctgaaagcggcaaaagtgtccacacctacggagcactggagcaatatcggaagaaattgcagtaagctgcctgctgttccgtataactggtgctctgccaccgtggcggatatactcggcaagcaggagtactgcggcgatacggtgaatttccgcagcaccaccaaatccttcaagaacaagaagaaaatcgagcgtccgccggaggaatggcagattttcaaggatgcccatcccgccatcatcgaccgggaaaccttcgccttggtgcaggagcttcgcaagcaccgccgcaggcccacgaaaagcggcattgtcagtcccttttcgggactgctgtactgcgccgattgcggagagaagctgtattacagtgtcaccaacaactacaagcgagagcaggcgtatttcttctgctcctcttaccgcaagaactccgaggtttgctctgcccactatatccgtgagaaagtggtggagcaaatcgtcttggagagtatgcagcgcatccttttaaatgtgcaggtgttcgaaaaggagttcgcccgcaagcagatggactgctacacggaggacaagaagaaacagcttgccgccaagcgccgggagctgagcaaggcgaagaagcgcattacggagattgatgccttgattcagaaaatctacgaggacaacgccagtggaaagctatctgacgagcgctatgccaccctgtccctgtcctacgaggaggaacagaaaacgctgaaagctgctgttccggagatgcaggtctatttggaaaccgaaacggataagactgagagcttgcagcggtttattcagaaggtgaaacaaatcacggagctgaaagccctgaccccggagctggtccacgagttcgtggacaaaatcgtggtgtatgcgcccagataccttgatggcaagcgagtacagcttttggacatctattacagcggcgtgggcattctccacgagctgacaccggaggagatggaagaagccttccagcagcacctcgcccagcgcaacaaagagaaaacggcatagccacaagggttacaccgtttccgaaaacttattaacctgagatacaagagccgcctcggggcaccttccttacggagggtgccccgaagcgaacagcttttttagcttttatgaaattacttgaagaacagcgggagcggctccagatagatgatatccgtacgatcctttgcatcgccctcggcgagcacagccgccttgccgacgacgttaccgccgatctcatgcacgagatcttccaacgcgctcagcgattcaccggtgctgatgacgtcgtctacgatgagaatacgcttacccttcagcattgcgcagtcttcttcggagaggtacagcgtctggatgtggtcggtcgtgatggatttcacctcgaccttgatcgggttcgtcatgtacgccttgatgcccttacgtgcaacaacgtactgacggcagccgatgcgcgccatctcgtaagccagcggaatgcccttagactccgccgtgatgatgatgtcgtgctccgggcacttttccatcagcgcttttgcggtcttctcggtgatctctacatcgccgaacataacaaaaccggcaatatccagcgtatcgctgatcgggcagatcggcagctcgcgttcgcagccggcgatcgtcatcttataaacttcacccattgtaaaaacctaccttcaaaaattatcgattttcgttatatgcggggaatcagcccggaggccacgccatagagcgtccgccgagcaggtggaaatgcaggtgctttacggtctgtccgccgtcttcgccgcagttgttgacgatgcggtagccgttcgtgagaccttctgccgccgcaatcttctttgcgaccgtgaagatatgtgcgacgatctgcgcgttttcttccgtaaggtcatctgcggaagcgatgtgctcctttggaatcatcagaatgtgcaccggcgcctgcgggtcgaggtcgcggaatgcgagcattttgtcgtcttcgtagaccttcgtgctcggaatctcgccgttggcaatcttgcagaaaatgcagtccatttgcctttctcctttcttgagattttatatagaacgtatagagagaacttagatctgttcgctgagaatcttttcaacggctgcaagggcttcgtcgatcttcgtctggtccttgatgcctgccatagcgaagtccggcttaccgccgccgttgccgccggtaagctgtgcaactgcctttacaagcacgccggctttgacgccctttgcctgtgccgctttcgttgcggttgctgcaagcgttgcctttccgtccagaacgcctgcgagcacggctacaatggccgtatcgctcttttcgtcgcggatcttatcgcacatggtgcgcagtgcgtcgctgcctgtgccggagagcatcgccgtaacgatcttgacacccttaacttccacggcgttatccagaatggagccaaggttcatggatgcaatcttggagcgcatggattcgatctctctgtccttctccttgaggtcggcgttgacctgtgcagcctttgccgggaggtcggacgggttattgactttcatcgcaacagcggtatccttgagcagcgtgttcgttgcgtagatcatcttaatgacgttgagacctgtgaccgcttcgatacggcgcacaccggctgcaacggaggattcgctgacgagcttgaagagaccgagcttagcggtggaatcgatatgcgtgccgccgcagaattccttagagaattcgcctaccgttacaacgcgcacgacgtcgccgtatttttcgccgaacaacgccatagcaccgagcttctttgcttcttcgatcggcatttcgcggcactcaaccttgatgtcttcgaggatcttctcgttgacgagattctcaaccgcgagcagctcttcgtccgtcagggcggagaagtgcgtgaagtcgaaacgaacggcattctcgttgacgagctgaccggcctgctcaacatggtcgccgagcacggagcgcagtgcagcctgcaggaggtgagctgccgtgtggttgcgcatgatcgctctgcgtctctcaacatctacaacagcctcaacggtgtcgccttcgcggaggaagccttcctccacaacagccttgtggataaacacacccgctgcattcttcgtggtatccagaacgcggatggtgcaggaatcgttcgtgatgacgccggtatcgccgacctgaccgccgctttccgcatagaaagaggtgcggtcgagtgtgaacacgatgtcgtcgccggtctcgacagcttcaacgcgtgcgccatctttcacgatagccgtgacctttgcggttaccttcatatcggtgtagccgacaaactcggtctttttaatgtcgtcaagcacatcggagtcgcctgcccatgcgtctgcaccggcattcttgcggcttgcacgagccgtctcacgctgctggagtaccagtgcgcggaagcggtcttcgtcaacgctcatgcctttttcggaaaggatttccttggtcaggtcaattgggaagccgaacgtatcgctgagcaggaacgcgtcttcgccggaaagcacctttgcatcggtgcggtcgatgatgtcgttgagcagcgcgaagcccttatcaatggtcttatagaagttttcttcctcaaacgcgatgacctttttgatcatagcgctcttttcacgcagctccgggtaagcgcattcgttctcgtgaatgacggtatctacaacgtccgcgaggaacgggtggttgatgccgagaagtctgccatggcgtgccgcgcggcggagcagacggcggagcacatagccgcggccttcgttggacggcataacaccatcgctgatcataaacgtcgtgctgcggatgtggtccgtaatgacgcgcagagaaacatcggacttttcgtctgcaccgtactgcacatttgcaatgcgagagatatgcttcatgatgttctgcacggtatcgacaaggaacaggttgtccgcgccttgcatcacacatgccaaacgttcaaggcccatgccggtatcgatgttcgggtgatcaagcggcgtgtagttgttgttgccgtcgttctcaaactgtgtgaaaacgaggttccaaacctcaacgtaacggtcgcagtcgcagcccacgccgcaggtgggcttgccgcagccgtacttttcgccgcggtcaaaataaatttcggaacacggaccgcacggaccggagccatgctcccagaagttatcttctctgccgaggcgtaccatgtgcgacgggtctacgccgttttgctttgtccagatgtcaaacgcttcatcgtcgtcctgataaatggagatataaagcctatctgccggcatctcgagaacctttgtaaagaactcccaagcccaggcggtcgcttcctttttgaagtaatcgccaaaggagaagttgccaagcatctcgaagaatgtaccgtggcgtgccgtgatgcccacgcgctcgatatccggggtacggatgcatttctggcaggtggtaacgcgctttctcggcggggttacttcacccgtaaaatactttttcatcggggccatgccggagttgatcagaagaaggctattgtcatccttcggaatcagcgggaagctcggcaggcgcagatgtcccttagactcaaagaaagaaagatacttttctctgagatcatttaatcctgtccactgcattgtattcaccattccttctataatttgcagatagaataatataaaaagcctaagctcagtctaaaacataagcctcaagcagctttaacgtattttcgacgccttcaatgtgggagcgctcgtagccgtgtgaagcgtaaacgcctgcgccgatgaggccgtgacgcacgtcccagccggaacgcagcgatgcttctacgtcggagccgtagtgcggataaacatccacggcatactttgcaccgacggacttcgccgcttccacaagcgcggttgtcacggcataattgtacgggccgccggaatccttcgcgcagatggaaacttcgcgctccgtgcaggtgagcccgtcgcccacgcagcccatgtctacgctgatgagctcttcggcatcgctcggcacggaagcggaagcaccgtggccgacctcctcatacaccgtaaagtgcagatagaccttgcgcttcaaagtgcggttgttgtctttgatctcctttgcgagcgcaagcagcatggcggcgctgagcttatcatcgaggaaacggctcttgatatagccgctttccgtgatgacggtgcgcgggtcaaagcagacgaaatcgcctgcttcaatgccaagtgcgcgcacatcatcggcggattttaccggctcgtcgagcacgacctcggtcgtttcaaatgtgcgcagcttttcaccgtaggagccgttcacgtggatcgacgcattgcaaagctgcaaggtgccgctgtaaacgccggagaagcgcgagtaaatgcggcagttctccgcttcgcagttttcggcgcgcaggccgccgatcggcgtgatcgtgatgcggccgttcggcttgattgtggaaatcatgccgccgagcgtgtctacgtgtgccatcagtacaagcgggctgccctcgccgccgaggcagcagaaaacgccgccctttcttgttttttccggagcgtagccgagtgctgtcagttcaccgataagatagtccgccgctttatccgtaaagccggacggagaatcgatggaaagcagggctttgagctcggaaaggcaatagtccatattcatgttttgccactccttacaaaaaaaaataagaactgtcctccgcaatgggacggacagttccgtggtaccacccaaattgtgcatgaagcttttcttcatacaccactttgaactccttaacgcggaaaacggcacagctcatcactgtgcggcagtcatacgggttggcctgtgcatggtgttttccgaggatcttccagcctgtggatccgctctctgttcggtacagctatgtgcatttgcccgtgccttttgctataaaacaaattaaaatctaaaatcaccagcggctcatgtttcgtttgtgcttttcgagatatacattctcgacttcattcggcgtgatgtcgtagcacagcagaacatcgtttaaatacatgagcacatcacacacttcttccgtgaagtggtgtctggtctcggggtcgttcaaaatcgcatcgtcaccctttttcttgatgatgtcggcaacttcaccggcttcaatcatcatccaaaggagcttatcgcgaccgattttcggagaaaggcctccccatttttcgagatattttgcttgcagttctttttgaatctgctgcatatcttcaagattcaggcttgccatatctccacccctcatacgtgtcctattataatgcttttttaccggcttgtcaattaaaatcgacaagtgcttcgccgattttgcggaaagcctgcggcacatgcatttcgccggcagtttcttctaacacgacgagggtataaagcggctcttcctgtgcattgcagatgtagcctgcataccaataattctcgatttcttccccgttttcgtcatatacacctgtctgcgccgtgccggtcttgatgccggaaacacagttttgcggcgcgccgatccgtgctgtaccgaaccgtgctgtgctttccatataggcacgtaagcgtgcggcggtcgtcggctccatgactttttcaccggtgttttcttcggtttcctgtacggataaatttgtatcgaccgggccatatacgagccgcggcgtcatataaatgccgtcagcggcgatggcgtttacggcagcggccaaattcagcggtgagacagtcgtttcaccctggccgaacgaaaacagcgccagcgcacgggcgtttttaagggcttgtgcgttcgaaagcgagcctgcggccgtttctaaattgtctgcaagcgaaacagatgtaccaaagccgagcttttccgccatacttaaaatcttttccgcgccgagtttctgcacgagctgtatgaaatacccgttgcacgagctgcgcagcgctgtgtggagattcacttccccatgtgctttgccgccgtagcaagtgatcgtgaggccgtcaacaacaatgcttccggtgcaggtgtacatctccttgtaatcgatgccgcattcgagcgccgaggcggcgcagataagcttaaagaccgaaccgggcgtatacgcgcacagggcacggtttacaaacggtgcatcttcattttccatgcacgcagcaaggtcgttcgggtctacggccgggaagcttgcggaagccagaatttcgccggttttgcagtctaaaatgacggcggcgcctttttcgatttccgcgcaggcattttctacacactgctgtatgcgcttatccagcgtcagcatcacgccgccgtccgcaatgcggtatgtgttttccacgtgcattgcttcgccggagatggcattgccgagcgcatcaatggcgaaggtaacgtcgatttccccgtggttttccgcaagcagtgcgtcgaagcttttttccacaccgtccgcgccgttatagtcgctgtcgagatacccgagcagattcgccgccggttgcgggtttgcataccgttttgtgacggaaaatgtctggatgccgtcatcactgacgggtgttgtgacttcgatcagaaacggctttccgctttcaagcgccgtgcgcaggacttcgcgtttttcttccggtacagcgcggtttaatttggcaagcgtttcccgcgagggaattaccgcagcgacataaacacgctcggcgtttgtgagcggctgcaaattgcggtcgtagatcgtgccgcgcgccttggcggccgttaaggtatataaactctgccgcccggcggcttccgtatagcttgtgccgccgaaagcggcggtcacggtgccgagcagtgcgatgacgagaaagaacatcacaaacgcatacgttgcgatgatcctgcgtgtagacataaaaacacctccgtataggaaaagtatgggccttaaacggaggtgttattcagctgcgcttcactcttagaaacgcgccctctttgatttttcggtcggtcttgaggtaaaccgtcatcgtcgcgtgcggtgcggattcgattggctccatatcctcgttgtagatgtcactaagtgtgaggtcatacggcacttcgcccggctccagtacgctgacggtctcgccgcggaagaagcggttgcgctgtgaaaggcgcatcatgccgtttccttcgccggtgcacacggccgcaacatcccagccacggatgtatccgccgctgtttacggtctgccccggctcgtgaccgctgtaaaacccggtgctgtacgcgcgatggctgatcttctctgtctcgtccacgacccactgcggaagcggctcaccgttcatgacagcatcgatgccgtggcggtacgcattcgtcacgcaggcaacgtaatacgcggactttgcgcggccctcaattttgaggctcgaaatgccgcattcgatgagctgcggaatgtgctcgatcatgcacatatcgcgggaattgaagacatacgtcgatttctgatcctgttcgatcgtgaacacctgatccgggcgcgtgcgctcgatgaggtaataatcccagcggcacggctgcgcgcaatcgccgtggtttgcgtctctgccggtcatgtagtttgaaagcaggcagcggcctgagaacgaaacgcacatcgcaccgtgcacaaatgcttcgatttcgagcgccttcggcgttttcgcgcggatctccgcgatttcttcaaacgagagctcgcgtgccagcacgacgcgctctgcgcccatgttataaaacgcgtttgcggtctcatagttcacaacgccggcctgcgtggaaatgtgtatcgcgacattcggcgcgtatttttttgccatggacatcacgccgaggtcggtcatgatgaacgcgtctacaccgattgcctggcaaaactcgagaaatgccggcagcgcggcaagttctgcgttatgcggcagaatattacaggtgacatagatcttcacgccctgcgcgtggcagtattttacagcttcttcaagctcctcgtttgtaaaattggaaggcgcagagcgcatgccgaaggatttaccggcaagatacaccgcgtccgcaccgtagcgcacggcagaaataaggcgctccatatcgccgaccggcgccagaagttccggcgcgttatatcgtttttgttccatgaagttcattcctttactgcatttgtgccttcccggacaaaattcgccggaaaggcacaggtagctttgttatcgtaaatgttgtgtcggttacagcagaccggcttccgccatgttcatcaaatgatcatccatcgtggaagcgtagtaagccttaccattgctgtcatgacagaaataataggcattacgacaatcatcactggttgatggatagattgccgccataatggcatcaagacccgggttgcagatcgggcctgccggcaggccgttgttgtcatacgtggagtacgagcttacaaagccctccggcgcgtcatttgccgttttgtacggataataaactgtggagtcgcagtccagcgtgtagatgtcatgctctgcgccgctttccagtcggttgtgcaaaacagcggaaactttatacatatcttttgtatctgcagcctcggcctgaatgatggaagcgagcgtgatgatctgatccgtggtatagccggatttcgcaatgtcatcgcgcatttcgtcggtgagcttattttcaaagttattgaggaagcggtcaaggatcgattctaccgtatcgttttcaaagaactggtacgtatccgggaacagatagccctcgagcttatagtagcggtcacttgtgttcgtgatggctgcaacatccgagtagctgtcgtaatccgaagagttgcaagcttcaaggatctcgtctgcagtgtgcaggccgttttcttccagcaaagcggcaagctgctgcaccgtgatgccctcacggaacatgacggtgatctcttcgccgagatccgggccggactgtaaggtattgacaagctgcttataatcgtagtttgttttgatcgtatacgtgccgggttcaaaatactccatttccgtggtgaatttgcagaaaagggagaaaaactccggcttatcgatcgcgtggctcttgtaaagaatgtccgtcagctgctcctgcgtcacgttttcgggaattgtgacctccacttcggaatccgtgcggtctacaccgagaaaatcgttggagccgccaatcaggtacgaagcgagggttaaagagaccagaataaccatggcaagccacgtgaacgcgaaaatgcgcttgttttttctggcctttacacggtttcttttcttgtgctccttcgcttcctttttctgattgcgttccgcacgggcggagcgtgcaccggcagagctttcttccacgcgctgtggtgcgcggctgccggcatagccctgcaagtcctccagttcgtctgtgtgattgagctgatcttcggaaagattcagcttgaattcgcgcgaattctggctgtgcggggtcgcgtccttcggggcgtagcgcctgccgttatcactcatattttcattccatcctttcttcatctgccgtcaaaacaatccgcttgtcggtcaaaataccgtccatgcgtacatcatgcggctgcgtcggcacttgcggcacaaactgaaaatcgtagcataggccaagctttaaaaccgggtgccgtgcaaaaaacgtatcgtagtaccctttgccgtacccgagccgtgcgccgtctgctgaaaacgccagtcccggcacaaggcacagtgcattcgcctcatcttgatatgcctctgcttctttcggctccaaaatgccgtaagcgcccggcgaaagatcgcgtaaagccgagatgcggtaaaacaccatgcggttcgtgtttggcacgcatttcggtacgtaaagcgctttgtcgtctgcaagtacacgatcgagaattctgagcgtatccgcttccgtgccgaagcttacgtagctcaaaacacacgatgccttttggtacaccgaaagtaccatgagccgctgcaaaaggcagtcatcccgtgtagcgcgatccgtgcaggctttgcgtgccgcacgcatttttcgacgcagtgcgtttttttcggttatatcggtcatcaatccgtgcactgaatgccgtcgtggatcttcttttcaacgtccttgccgaccatgagaccagcaagcgtcaagccaaattgcacggcaacgcccatgccttttgccgtgacgatcttgccgtctacgcagaccggcttttcggagattgtggcgccctttaattcgccttcaaagcccgggaagcagatggcttccttaccgttcaggaggccgagatggccgagaacgctcggtgcagcgcagattgccgcaaggtaaatgtcgttctttgcgcagtattccgcgcaggttgtgacgatcggcgatttttcgagattcagtgtgccgggcatgccgccgggcaggatcatcagctccatatcgtccgttgtaacgtctttttcttcgatgtcagctgttacggtgataccgtgggagccggtgattgttttgccgccgacgccgacggtctttacttcaagctctgcgcggcgcagaatatccacgggcgcgagcgcttcgatctcttcaaatccgtttgcaagaaatacatagatcataataaatcctccagcttttccttgatctcgtgatgaatatcttcaatgctgcgcaaggtgtcgccctcggcgcagtttaatacggtccagtttaaatgctctgcggcgtacagtgcacagtccctgcaatgtagcagataatgtatgtcgctttcgtgaatgtcttttttggtggtgtcgcctgcgtagcgctctgtgagcagcctttgggaaatttcaggcggcgcatccagataaatcacacgatccggcctcggcaacccgaatttttcatattccaggtcttcaagccacgaaacgaacgctttccactccgtttttggcagcttacttaattgatatacaatgttggatgtcacatagcggtcggagatgatcggcacaccacttgcataatcgtctttccacttcatgcggtagcttgcaaagcgatccacggcgtaaaatgcgcttgcggcgtaggcgttcacgtctcccgcctcttttccgaaatcgcctttcagatacatttttacaagcgatgaagacggagagtcataatccgggaacgttacctgccgtgcgcggccgcgcgataaggcgtaatcatacaaaagctttgcctgcgtgcctttgccgctgccgtccagcccttcaattacaatcaatgccataagtttcatttactgctttctgcgtaaatttgccggcctttgccgactttttgcaccgcagcgcggtacattcctattcattatagcaaactgcggcgaaatatacaaccgaaaaatttcttacaatgcgaaaaaaccgagcaaaacggcgggacaggcacaatacccgcccttttccgtacaatggcattgagaaaccacaaaggaggtttacaaatatggctgaaaatgagcggacacccgattgcgaaaacggcgcagcgttaaaagaagccgtctgcatagatgccatgcgcatttatgattcctgttcagataaagactgcttagaggatttacgtgtgctgtttcccgcctcggtgcagcccgttgtggacgcttccgctaatgtgcgggtgcgggacgttgatgtaatctctgtgtacattgatatgcagccgatcccctttaaccgcgggtattactccattgatctcacgtttttctttgacgtatctttggagctgtacggcggcgcgacagtgggctgcgaacgcgtgagcggtatttcaattttcaataagaaggtcattctctacggcagtgagggcaacgtgaagatgtttacaagcgagagctgccgtgacgaagccgatttacagggcaataaggtcttacccaaggcgactgtgcaggttgcgcagccggtggcgctttccgcaaagctttgcgagcactgccgctgcggctgcgagccctgctgcgtgatcccggactgcattgcaagccgttacggcggcgcgtttgaaacggtagagcagaaaaacaccgtatacgtgacgatcggcctgtttaccatcgtgcagattgtgcggaatgtgcagatgctcattcccgcgtttgatttctgcattccggataaggaatgcgtcacctccggcgacaacccctgcgagctgttccgcaagattgatttcccgaccgacgaatttttcccgccgaaagcgagcgactgcggctgtggctgcggcagacaaaattagaaccgcatttgaataatataagccgtgcactttgaaaacaggtgcacggcttactctttttatacttttgtcagtcttgcgaagtttgcaaacagctttttggtgccgactttgtcaaatgcgacttcgagtagcgtatcgttcgccatcggcgtggcggaaacgatgagacccgtgccgaacgccttgtgcaggacagtatcgcctacgcggtatgtaccggcaggcgcgggctttacgcgcggcttcggcgtgaatccgccggcttccgcaacggattttgttttcggtgcttccccgaacggcttcgcaccgccgaagctcggcatagagaccgggcgcgcgctgtaatcgcgggagcgggtgtgctcgacgagcgtctccgggatctcttccacaaagcgtgaaacgcggttgcggttcgtcatgccgaagatcatgcgggattccgcgtggaaaatgtacagctcctcttttgcacgcgtgatggcaacatacgctaaacggcgttcctcctccacttcggacggtacatatacgctcgccatgcccgggaaaatgttttcctccatgcccggcaggaacaccaccgggaattcgagaccttttgcggagtgcaccgtcatgagcacgacggaatcggcgttattatcgtaattatcgatgtccgtgatgagcgaaacttcttcgagaaaatctgaaagcgtgccttctgggttttcctcctcaaaacggcgcaggttggaagcaagctcctgcacgttcgcggcgcggtcttctgcggattccgggtcgtcggtcttaagaaaactcaggtaatcgatgcgctccacaagctcgtcataaagctcgccgagcgtgacttcttcgtcgttgttgagctcgatgagtccctgcatctgtgcggcgaaaagcgtcattttgtttgcggcacgggacagtgcgggatagtctttcgcgtgcgagacgacctcaaacagtgtctcacccgtctgctgaccgatctgcgccgcgacttcgaccgagcggtcgccaatgctgcgcttcggcgtgttgatgatgcggcgcaggcgcatttcatcgctcggattgttgataacgctcaaatatgcgatcatctcgcggatctcacggcgctcgtagaagcgcgtgccgcctataattctatgcggtacgccggactttgcaaaattgcgttcaaatgtcagcgactgtgagttcatgcggtacaaaacagcgtaatcggagaatttccgccccgcagcaacgccgtctaagatgatcttcgtgatgcgttcggcttcatccgtttcgttttctgccgtgtgcaggtggatcatggcgccggtgccgttctgtgtccacagcgttttaccttttctctcggtgttatgctcaatgacggcgttcgcagcgtccagaatgttctgtgtcgagcgataattctgctccaaacgaatgaccgtcgcattctgaaacgtattttcaaagctcagaatgttttcgatcgtcgcaccgcggaatttgtagatgctctggtcgtcgtcgccgaccacgcagaggttaccgcttttttcggccagcatgcgcacaaatgtgtactgcgcatggtttgtgtcctgatactcgtcaaccattagatagcggaaacggttctggtagtattccagaacgtccgggcactttttgaagagctccactactttgttgatgaggtcgtcaaagtccatagcatcggcgtcttccaaacgcttttggtacgttgtatacgcgcgggagataatctttaatctgaaatcgtcgccgaccgtgagggcgtactcagcaggcgagattaaagaatcctttgcccgggaaatctcgttcaaaatcgattttggcgtgatgtttttttccgaaatatcgagctcttttaagatgcttttcatcaagcggcgctggtcgtcggtatcgtacaccgtaaagtgcgaggaatacccgatgcgctcgccgtcacggcgcaaaatacgcgcgcaggtggaatggaacgtcgatgcccaaatgtcgttggcggtctcgcccagcatggcgcacaggcggtctttcagctcgcctgcggctttgtttgtgaaggtaatagccatgatgcgccacggcgcgcaggcggaaacactcaaatgctcctgtgtttccgttgtgagcggcatgccgttttcaatataagctttgcacgcggcaatatcattttcatcgagatcgtcacgcagataggtgctgttgtacgcgtcgccgtagcgcaggatattcgcgatgcggttgatgagcaccgttgtttttccgctgcctgcgcccgctaaaatgagcagcgggccgtttacggtgaacacggcttgcttttggcggtcattcatgcgtgcaaagtctttttccagcaccgcgcggcgcagtgcaaggatttccgatttatccataggttcaaatgatctccgttctgttggttctgtgttttctcatttttcggtttctattttactatatcttgcgaaaaagttcaatcgaacatagaaaattcccagggctggtttaaagcttgcctcgggaagtttatgtgtaagttaatatgactttacaaagtaactcaactttacaaagtcgatacgctttacattatgcaagcatcttacgcaccatgtcgtaaagcacgggtttcatattatctattgtatccggtttattttcaatcatcgtggcaaagcaagtggaaccgatgagctcaaccaccaaaaacacgcgcttatataagacatcttctgtgcagcccacggcgagcgagctgctctcaatggcagtgacaagcttgtcccacaacgggtcttctcttagatcaagctgcttttcaatcatcggccaggagaaattgcgctccaaaagccgcagtgtcagacggcttcttttaaagtattccacgatgtaatcgaccatgaggatgatgtcttctacaaaaacgccggtcttatgctcttccgcatattcataggcctcactcaaaacacgcgcggaaatgcggtatgtgagctgctgcagaagctgggttttatcatgaaaatacagataaaacgtaccctttgcgacgttcgctttctttacgatctcatcgaccgaggtcttgttaacgcccttttcaaggaaaagctgataggccgcctcgagcagcccctcctttttctgttcttttttctgttcaacaccgccgcgcatggctgtggcctcccaacattcaaatctacctgtgtaatcactttatttgtcttatagtataaggcggatacaccgtaaaaagcaagccaaaaacaacattttgtacagatttgaataaaatgactaatagtcaatttattttgcccacacagttcgtcacttttaatattgactattggtcatttttggactaaactacataacgaaataaacgggatggttcccgaatgaaaggagcggtgctaaatggagcactttgcacgatggatcgtgaagcgcagaaagctgattcttgttttagcggttctgcttttgatcccctcggtgttcggtgcgctcggcacctacattaactacgatattttgacctacctgccgaaagatctggattccatgatcggcgaaacgtatttggaggatgacttcaatatggcatcggtttccatgattacggttgaaaacatgtctacgcctgataccttaaaactgaaaagcgatcttgaaggggtcgaaggcgtacagaaggtcatgtggacgagcgattttatcgatgtgacgacgccgaaggaaatgcttccgagcgatattcagaagttcttctataacgattccggcgcaacgatgctcatcgttcagttcgatgccccgagcgcagatgccagaacgatgaacgcgcagaagcaaatcaagaacattttgaataaagattgcttcatcggtggtatgtcggctattttggaagataccaagagcctcatcaataaagaaatgcccttgtatatcctttgcgctgtgggcgcttcgttgctgattctgttcctcagcctgaaagaaacgattgtgccgcttatcttcatgctcggcatgctgttcccaatcgtctataacttcggcacgaacattttcctcggccaaatcagctacattacggaagcattggcaacggtcctgcagctcggtgttacgatggatttctccatcttcctactgcaccgttacgaagaagaaaagctgacggcggcgtccgatgaggacgccatggtggcggctattaaaaagacgttttcctccattaccggcagctcccttacaacgattgcgggcttccttgccatgtgcaccatgcagcttacgctcggcgaagacatcggcatcgtcatggcaaagggtgttctgctcggcgttatctgcactatcacggttttaccgtcccttatcatgacgttccgccgtgccattgaaaagcacacgcaccgcacgttcatcccgaagctcaagcgtacctcgaacttcgtcgtgaagcaccgtgtgccgattttgattgcgtttatcataatcttcattccgttcttcattgcacagtcaaagacttccgtttactacacgatttttgatgcgcttccgcaggaccttcccggcattgcgggtacgaaccgcctgaaggaagatttcgatatgacaacgtcccactttatcattgtggacgataccctttccgaaaaaagcctctccgatctttccgatgagttgaacgacgtggacggcattcaccaggttttgagctatgaaaagttcgtcggcggcgcgatcccggaaatgtttattcctgacgacgtgcgcgacatcttcgaggccggcggccacaagatgatccttgcaaactcttcttataagagcggcagtgacgagcaaaataaccagctctccgaaatgatcgatattgtgaaaaagtacgacccgaacggcgtcatcaccggtgaaggcgcaatgacgaaagatttgatcgaggttgcggatgtcgacttcaataacgtcaacatcacaagtatcatcgtcgtgttcgtcattatcgccatcgtgttccgctccgcttctgttccggtgctgctcgttgcggcgattgaaagcgccatcatgatcaacctcggcattccgtacttcaccggcacgacgctgccgtttatcacaagcatcgttatcggcaccattcagctcggtgcaacggtcgactatgcgatcctcatgaccacgcgtttccgcgaagagcgtaacgcgggtcacactgcaaaggaagcggctcaaattgccgttgaacagtgcagtcagagcattttaacaagcggtctcaccttcttcgcggcaacgttcagcgtgtccctcgtctcccgtatggagctcatcggcgtgctgtgcaagctcatcagccgcggcgcactcatcagtatggcagttatcctgcttgtgttgccggcactgctcgtcatcacggagccaatcctcagaaagaccacattccattggctgaaaaagcccgaaatcaccgagaaaaaggcataatcgattcagagaaaggatctcgatcaatatgagtaagtatcttacaaaatccgttgcggctacgatttccgcacttctcctcctcggctgcgctgctccggccttcgcggcggatgctaccgttgagaaaaaagaaacctcttatctcatcctgaacgcagacggttccgtgcaggagcagatcaccagcgattggctgcacagcgatgacggttttgatgccgttaccgacgaaagcgacctttccgatatccagaacctcaagagcgacgtgatgccggaacagtccggcaatacgctcaagtggacgacggacgaaaccgatatttattatcagggcaagaacagcgcacaggcaccggtcggcgtttccatcgagtatacgctgaacggcaaggcggttacggccgatgaactcaagggtcagagcggccaccttgtcgcaaccgttaagctgacgaacaacaccggcgaagaagtgaccgtaaacggtaaaaagcgcaccgtctataccccgttctttaccgttgcggcggctgtgctgccgagcgaaaacttcaagaacatcacgacagagcacggtcttgtggagtctgattccaaaacgcaggttgcctgctaccttgcgatgccgggcatgaaggaagccgtcagcgacctgctccccgacagctttgataagctcgacgacctgatgctcgatacccttaccctcgaagcggatgttacggactgcaccgtcccgacgtttctcttcgccgcggctccgagtctttccgacctcgacctcgatgaggtttccgacgagcttggcgacacgatggatgaactgaccgatgcaatcgatcagctgaaggatggttccggcgcattggatgacgctgtgggcacacttgtcgaaagccttgacacgtttgcttcgagttacagccagtttgatgccggcgtggacagcgctttgaacggcacacagacccttgcaaacggcacgggaaacctgcttgaaaacgcacagctcttggcaacgaagaccggcgagctttccctcggcgctattcagctgcagaacagtaccgcacagcttgcgggcgtcatgaatcagcagcttgtcccgggccttgtagaggcttccgaaaagaagaccgcgcttgaagacaaaatggccgagctttccggcaagctggagaccgttgaaatcccggatatgacagcactcaaagcacagctcggcgcaggcgctgaacaggttttcgatggcgcggcgagcggcgcagcgaaagcggcttccgaagctgctgcaagcaaagcagcaacagttgcttctcagaagacggcggaagagatcaagggcaacgtgcagaaggcagccgatgatgcggcagtcggcgcagatcaggtagcagatcaggcggctgcactttcgaccgatgtattccaaggcggttataagacggcactcgaagaacttttaagtgatccgaatttccttactgaagatcaaaaaaatgcaatcttagcaaaaatcgatgctccggcttctccgagtagcgaaattaccgatacagttacagcaaaactttccgacgcagcaacagttgctgtaaaagcggcaatgggtcaggttgtaagcgatattgattcggatacgattgcaagcactgtcggcccgaaggttgccgaacaggttgccccgattgttacagaagaagtaacgtcttccgagaaacttgcggcggcaaaacagagcgctgtgcagcaggttgcagcggcaattccggacattaacaccgatgagctcaagagtttgatgggtgaattcaaagacctctcctcgcaggcaggcgaaatgatggacagtgttgatacgctgaccggcgcgctgtataacgcagagaatccggcagataccaacacggttgtcggtgcggctaacgcgatttccgacggtgctgcaaagcttggcagcggtgcttctcagcttgcaaccggcacctctgcattcgcaaccggcgtaggcacgctcgatgcaggcaccaaccaactgctcggcggcatggagacgctctcttcctccagcaagaccgtatcgaatgcgatcggtcagttccagaccggcggcgcagaacttaaagacggtacgtctgaactcagcgacggcatgacagagttctccgatacaatcaatgataagctcgacggcctcagcgaaattaccgacccggattccacgctggcacgcgtgattgacatcatgaaggatcgtgcggacagcttcaagggctccggccgcgcagacggtacggatatgaccgtaagctacgtaatgcgcaccgcaacggactcgagcagcaacagcacgagcaccacggaagaaaccacgaccgagactgaaaccaaagacagcttctggaaccgtgtggcaaacctcttctctaagtaatttaaaataaagcaaaggaagcaggaacacatcgaaaggtgcgcctgcttcttttttattgcttttttcggtgaaacggtgtatgattatcgtgtttaaattagcagaaaatggggttgaaaaatgaaaaaactatgtatgctgttcctcacatttttgaagatcggcgctttcacgttcggcggcggctatgcgatggttgccttgctggaaaatgaatttatcgcaaagaaaaagtggatcgataaaaaagagttcctcgacatgatcgcgattgcggagtctacgccgggcccgatagctattaacagcgcaacgtatatcggttatcacattgccggtgtgcccggcgcggcgacggccacgcttggggtgtgtatcccttcgtttgtcattatctacctcatttccctattctttgaccagtttttgagcttgaaattcgtttcctgcgcgttccgcggaattcaggtgtgtgttgtgtacctcatcttttccgccggtgtgcgcatgctgaaaagtcttgaaaagacggcgttcaataccgtgcttgttacaggcgtagcggtttgcatgatagcgttttccgttttcgctgtttcgttttcgtccatctactttattttgcttagcggtgtggttggtcttgcggcctacttcatacagcgcctgcgtggaaaaggcggtgacgtgaaatgatctattttaaattattcctgaccttccttgagattggcgcagtgtcgttcggtggcggctacggcatgatctccctcatccgcgaagccgtgctctcgaatcactggctcacggaaagcgagttcatcaacttcattgcggtgtccgaatcgacccccggcccgcttgccgttaacatggcgacgttcgtcgggtcttcgcaaggcggcgtgttgggcagtctgctcgcgactttgggcgtggtgctcccctcgttcgtcattattttgctcattgcggcagtgttgagtaatctgctgaaatacgccggtgtacaggcattcctctccggcgtgcgtccgtgcgtggtggcgctcattttggctacggcgctgacgatgggcctcagcacgctattcggctttacaaccatacgaagcgcccccgaggtcgatctgcgcggtgttgtgattttgctgctgctgattactttgcactttggctataagcactttaaaaagaaagcaccctcgcccattttgatgatcgtgctttccgccggtctcggcattttgttctacgcattttaaattttgggaaaagaaaagacctctgctcgggccaaacagtcttgagcagaggtcttttctgtacagaaaatagcgtttagccgttattttggctgcacttttcggcgtcgattgcaagcacgatcatcaaaacgcacagtgcgtctgcggggtcgtatatgttcaaaaggtatgtgtccgtccagttgaacagctctttggagatgcttgccacatcgtgaccgcttccggaaacaacggcataatcccactccaaaacgttgccctccacatgccagccgttgcattctacgttgtatttcggcttaaaaagtgcaaattcgcggctgatgcaaccgacatattggtttttaaaatacatctcgaatttcggcatgaacgtgaagatgcgttcttttaccgtgccgatctcttcgccgtaagcgtcaaaaattttcaggcagtgtccccaggagaactgccctttgacgacatacaccgtgttgccgttctcatcgtaaatatcgtagctgtcgaaccatgaaaaaaagcgctgtttaaaccgtaaaatcataaaaaatcccctacttcttgccactgttttcaatcgtatagatcacacagacgaaccctgcgatgaccgcgagcagtatggagccgcttaacccgtcgttcatggcagcgccgaggaatagcccgactatggcggccaagatgattacaacggcggaaccgattgttttcatgttcacgacaaaatctcctccacgtacttctttaagccgattgtaccacgctgcgtgtcggtttgcaatagacttctgcaaaagtaaaagaaaagaatacgttaaaagcaggttaaaaacatgaaaaatatccacattttttcgaattttctattgacatttcctttgcggttttatataatccaattgtaaatctgtcaagcgccccgcggtcacccatccttcggcccggggtgctatttttctgaaaatacaaaaggcgcagagcccgctcggaaatcccggcagccctgcgccttttgcagatcggtctttcctgcttcttccgcctcgtcaaacttcaccgctttcactttcagcgcttcatagcacggacataaagcagaaaatgtttgaaaaacattgtttattgatgcattagccccggcattttgactttatctcttctgatcttcgtgttccaagaataccgctctttaaaactccgaaatgcggcagcggcgatctccgagggaagctgtgtcttgagcggtagcttagattgatactgtgagccgaacaggttattgccccggacatggacttggacggtagattgctaccaaacaaaatttgtgaatgcaaacctcaaagcagtttgcttcctgcacgctttctatcctgcggcctgtgtcagcacacatgctgttgtgctttgcgacatgaacggcagacaaacgccgctctcacctgcgccgaccagcagctccgtaccgctcgggctgattaggagaggatacgtctcacacagatacgccgggccgtccgtgacaccgtagctgttaccgcccacaagcgacaagctgagcgtcacatagcttggcccgtccgggatcgtttgaatcgcccagaaaccgctccacatctcctcaatgtcgtcgctgtcttcgtatgtccactccagatcgactgtaccccccgtctcatcctcgagatagaagcgcagcgagaaataggcatagcggccggtttcctctaccatggtttctgtgatccagcccatgcctgtactctgcgatccggcaaggccaagcgcagtcatgcctgtccagccgtcagaaagccgaccggaaaattcggatgggatgtcataccaggcatattccgtaaaatcgaacgaaagataatcaccggcttccgatgtacacggtgcaagatggctcgtcgcatcaagcgagggataccattcgcaggtgttcccgttgttgtcggtgataaagacctgggtgtcggcctcatgcgcaatgccgtcgagattcgcaaagagcagcaccggttcgccgctctctgaccggtagagaacctctgtgacctcatcggtctgtgttttttcgttccactgcacacggttgatcgcaaccgtcgcgttctcgtcgaccggcacaatgcagtacagatgccctgcgccgccgatgatgtgctcatcgttgatctctgcgataaaggggtattcgaggagcattgcctcattggtttcctgcagccacgcagggaaacccgcctcaaaaccctcgtcaaacagaccgccgacatagccgagatacgccgcaccaaacattgtcgtcggaaaatcaatcctatcgcgcaaccatccaagcgatgtctctgcctgctgtgaaaacgcgtattgcaccggcggcgtgtccacggtcttatcctgtgatacaaaatcgttcccgtcgctctgtaatacagcttcctcctgttggctttccggagtttttttgtgggcagtatttattttgggttcgtcaggctccgtttgcgtcttctgcgtacaggcgcaaagcgacaataacagaaccagtgccaacaatagcgcgaacatgcgtctgggtgttgttttcatagccactcctttcagaattttccgcttcggccggaaccgcctccaccggattcgctgtggctgctcccgccgccggaagagctgcgctcaatcttccggctggaggtcgttttatgggtaaaatgatctgtttgctctgtaagctgaagttccgcggaaacataggcgttagcggttgctttttttgatacattttccattttctgccatatcacagagacgatcacgattgctgccagtagggaaagaccgatcacgataaggatcggaataaacaaactcgctcgaaccggctttcctgaggctgctttttccagatagacgctgcattctttgatgtaatcctcaaagccgccgtaccagtcgttctcaccgaagttatcgaggaataccttttccagtttctgctgaccatagctgttgaacgcatactcacagcgtgagccgtagcagaacatcgcccagtcgcgatcatccatgctgagcaggagcatgatcccgtcgcggtccggtccttcgcccatcgtgtattcgtgatagatggtataggttgccttatagacaccttcagaatggaagtcacgataatcctccacggttacaatatatacaccgatgccgtatttttgggagacggtttccgccatcttttccagcatcatattttcgttttcgctgagaagtccggcctcatccgtcacataataaagctgtgcacctgtctgctcggttgcggatacattcacgcagaatacaagcgcgattataaacgtcagcaggagacagcgtattctctctttcatttttccgccctccctagtgtgccaaaagcagcagcgcagtcacgccgatggcgctgagtgacgccgcgattgctgcaaacaaaccgacaacccgcttcgtgctgacaggaaggttgcctaccaacttacctgtctgaccattcatggcaaaaaggaaatcttttccttcccactttgtattcaagatccagacgggaagcaacgcgtaatgcactttgccgcgcttcaaacagatgtctcggctcgtttcattgcaggtggtgtaattcgaaaccgtgctttccagcgcagacaccagcgaacccgcgcagcgcttgtctgcccgctcccggctgttttcaacgctcacatcatatttgtctgccaaaaatccgggcagatacgctgtggaaaacggctttaagtctgtatagtcatacggttcgatggaatccatgtagtcgtccggcattttgcttgacgcgtccaccgggattttctcaaagccaatagaaccggcgcggcgcacatcgtagtggcttgtctccgtgatttcataatctcccgaggtgtacttatgtacagtggtagcatggaactgcacgcttccgctggccgcaccgtcatacatccagaagggtacatacacgcctttgacctcctcaagatgattggacttggagaatgttgacggcaacagcggctttttgcgatagtgtttcttcagcgccttgatggcatcctccttgctcagcttaaagggaagcacaaaatcaggtttcaaaacgccggcgaactgacccggaagcaccgacggatttccgcagtatgggcaggacgtagccgcagttgtcgcgtcgcagagcagctccgcaccgcacgacgggcagctgtaagccttcatgtcagccgcgtccgcgccccaatcctcgttcaggccggaagtgtcccagtcagagccgcctgcggcggtcttttgtttttccgcttcggcagttttttgagccgcttctgtttcttcctgcttctgcgccgcttccgctgcttttgtttctttttccgcgtagagcgcttcaatttctgcgacatcgaagcttgagccgcagtaatcgcactccagcctgccggattctcctacaaaatggagcggtcccgtgcaggcgggacattgataatttgtgatttgtgttgccatctaagttcctcacttcccagttggcgttacagcccgcaagcgcagtccgtagtgccgaacacagttataaccgcattttccggatgtgtcccgcaaactcactgtttgtgataaattgcatccgtgtcctttatgacgttttcttccgaatcgtacaagatgtgcatgtcagccgctgtacggtcactgttgacaagtataacggtaatcagcttttcggccttttctgcaatttcgtcgtaaacgcagtctgcatcgcaaccaaggtcaaagctctttgtccggaacgcggactcgacaaaaatgctccagctgtaccattcttgtgtctcgttgttccaccacatagtacaacagttcataccgcttttgtcctcatttacgacaaactcatatttttgcaggccgtcctccgtaacccacgtgccttccagcaacgcaaagacctcctgtgcttcctttttgctttcggcttttctgtcggcttccgcttgcagctcggccgcactgtaatacgcttcgcggtctcccgtttcgctccagccttcatcgtaccaaaacacgtctgccagccatgcaaactgcggggagtccagataacgcagacgataaatgatatcgtgcgccctgtcctcgattgtcagcccgctgatcttttcggcaaaatccgcctgaacggtcagaacaccgtttcggaacgtatggtcaaactgatcgcccaaatcttcaaaattcgcgtcgtagcagcggatgggattgtccttgaactgcacgcctcgataatagagactcatcgtcccttggctgtaaatggtttttgtaatgtgaaaatcgtcaaaaaggaccgatgttttcgggtactgataggtgcatccgtcgacctgaccgcaggaggtcagaccgagcaggctcatacccagacctgctgcgatgaggagcgctttgaatttcaccgcatcaccccccgttttttcgcgaataaccggattctcccgctccaaattggagcgggagccgttttttattcgaacgtcatattgttgagaatgatatccggcatcgttcccggtacacagtccatatcccgaaggccgatggaaagggcacggccgtcgtcaagctgcgcgatatactggatccaatcatagccgattcttttgtaggtgcggccgcggaaggtgatgccgccgatcacgcggtcctcgatatccttgtagttttcgaagctgtccttgtaggaatcaaatttttcaacgttctccctcacctcaaactggatggcgcccgcaccaaacgctgtgggatcgtcgttttccaccaggcagcgcccactatcatcgaacgaccagccggataccgggatcttcgtcatgattttgaccttaacatcgtcttttgcaaactgggcgatttccacggagaagtccttcatctcggcgtttgcagacgctgccttgttcgcctcggcggcctcggccttcacgatgtccagatacctttctatggcttctgtgccggagaagccgctggtgttgtacgcactcaccgtataaacgcccggagtcttttcacagaagttaacgtagatgaaatgcgagctgtcttcgctcgaaatccatttgtagtagcggtagtttgccttcatgtggtcgctgtactcttccttgacaaactcaccttctacgccgaagtaggcaacaatatcctcgtaagtagcatcaaaaatattcttattgacctcgttcatccaaacgtagcccttttgtacctgctcctcggtcacgatgccgtttccgccgggagctgccgcattcgtctggttggtcggagcattcccctccgaaacaccttctccgatggcgtccggcatagacttgcctgcgtcaatcagaggcagataccagtcggtataccggtagggatacgcatcttcctccatgtctttccaataaagaccccacgggcgcagataaatgtcatagtggaattcgtcatcgccatcttcatagtcgccgctgatacagatcatatcatcgtagtccaaaagaccggggtcaacgatccagtcggcatgctccagtgttacgtttgtaaaccagccaccctcggacatcaccgtaccgtgctcgccggttccggattcgctcagactgacctgcgcggaagccataggtttggatctcgtgtagtcctcatcccaaagctcgattgtgcctgtgtagtctgtgtctaaatcaatgacgccgcagacatcccaccagtcgccttccatgctttcataatcgccgtagcaaccgctcatcttccaccagccgtaccattcgccgttccaccaatcgagcaatgtgtctccggtcgtattggtggtctccggttccgtatgggagaccgtttcccggctgagcgtagccgggtcaacggtgattgtaccttttttgctgccgagaaattcctcaaaggtcgctttgacttcaccggttgtgtcttttagcacgaaagctgtccgcacttccagcgttgtacccggcgcaatatctgtgaactgatcgctcactacggtttcaaggttttcgtagtccgtgataatagatgcagcttccagctctacaccgttttgcataaccgtctcatcgacactccagagatatgaggcgttttccttgctgttgtttgtgaagtccagtgtcagaacgattgcgtcgtttccgtccgaatcttccatgatgcatgcgcccttgtagagcagctcatagtcaccgagcttgattaaattggagtctttcccctccttatcctttccgcaggcggtgaggccgctgagcagcatcagtgccgtaagaatcaggcatagaagcttggtcttcgtctgtttcataatttcctcccaatatccttcagggttgcacaaatctgccgatcagcagaaaacaacgtataattccggcaaaaagcagccgtgcctacctgagacatttttcttatctcttttcgcgccggataaggtttccgtccttgtcggtaaacttaccgcagagaatcttgataaagtcgacaaggtatccgatgccgaacagaccggccgtcagcgtgtagagaatgcctgtgccaatcttaccgacatagtagcggtggacgccaagaccgccaaggaagaagcaaagcaagaatgttgtcatccagtccttcgtttcgaccggaacctccggcgcaacatagtcctctactgcctcaccgttcaaaatcttcttcacggtttccgttacggtgtcaatataggcgccacgctccgttgcaagaccgaccgtcgcacccttgagacccttgcgcagtgcgctgttcttatcaacgcgcataccgccaaccgacatcttagcctccgtaatgaccggctgaatccggatgtgtgtgccatccttgaggtaaagccagaggccaacgtccacatttggttctttctcaaacgagatgcgctgtccgggaacgccgcctttgatctggaatggcatctggaacgctgctctgcgcgcattgagtttctgcatgatttcttccagtgtggttgaataaggaaggtcaaattcacggggactggtagcgaatgcaacgtctttcatgctgcctgtaaggttattcatcgttttatctcctttctaaaaggtcagaggcggatagtgttaacggtaagctacacggctattttttcgtaaaggtgccgctgatgccgtagccggaattctcattcatggtaaggctgtttccatctacggagaatgtataagtagatggatcactccatgcctccagtgtcaccgtaagctgatcaccttcaatagtgtacgtaccgtcctgtttcatataagcattttccatggtgcatttgccgcttccgttgaatgtccatgtgatcgtaccgtctgcgccaagttcggcggaccatgttccggctaacgcatccttgctaccacaggcagaaagtgttaaaagcgtaaccacaatcagaagcaatgctacaaactttttcattattttgtccttctttctttaattatcatttgatagatatttatcctcttaccgcgccaccgcaatattcacaacagccgttcacgtccggtgtggtcgttgcgccgcagtagggacaggtgactgccgttttgggtgcggcctcctgttcaatctgctggcgcacatccttgcggacctgcgtcagaacctgccgaatttcctcgccgagctttttgcaattgcggtactcaacgttagtctccggattgcatcgggtcgtcattcccggtcgcattgcgggaggcggtgtaatatctacggaatcggaattgatcttgaagcgtatttcgtcaaagtaatcgttgttgacgaatatggtgatgtagaaatcataggagtattcataccgcgggggattgtagctgatctccctcccctccttatcctcacgcttaagttccgtgcggctctcgtcaatgtcgagattacagccggtcacatctgcaaaatccaaaacatccgggttggcttccacgagatttctggcacgtgtcaccatgaattttcccgcatcctcgtcaagaagcaccttggtgtccgcgccgagcgttctggttgtgtggaatgccgcgacctttttctggttttcttccctgtaatcaagctgtgccttgatttcctcaacagtgctgttgcgccgatcagagaaccaaggggaaagcttttgggcgcagtttttgcagagattgccgttttcaagcttgcggttgccaagtaaccctattttttctccgcaaatatcgcaatattttttatcaaacagtcccatatatgtatcaaactcctttgtgtatgctacttgaattatacggttactgcgtgtctgccttggaattgagtaccgcaccgtagatatacaaggccggaatagctattcctgtcaggatgcttacgacattaaactcgccgccgttgaccagactcatcacaatgctcaatacgctgaatacggccacaatcgcgccccacacgatgagctttcctgctttttcgctgcgcttactgtgcttaatgcctttgattccggcaatcatctggcaaattcctccgaccagcgtcaggaacagcgccgcccaatatgaaaatgtcagaccggattccgcaccgaatcctgccgccaatacacccagtccaccgacaaaaacacccgcaatgatggaaaatactgcggcaatgatcatcagaattccggtaaccttcaaaaatttatgtcctttcatggtaaatcctcctgttacaataaatcgtatggtttgtttttattctttcgcagggtgtttggccccacattctgcacaaaatgtacgactgccgtttggcatacctcgcattactccgtttcaaggtttgacgtggcataagcttcttcggcaatacgcagcaccaaggtctccagcgcttctgcatggctgccgctgagcttttgaatctcgttcccgtcatcggtgcgccaaatgacccggatttcgctgtcggtctcgtcctggacatttggagacggctttcggtacgcgggcagatccgactctgccagcatattctgaagttcaaaccattgcacccacgtaagctgccaaggaattgggttggaaaacgcatccgtttcgctttctctcatctcgtcgccggattggtccggaaaccggccggtcagcagaggcatatccttctcccggtagaatttcagtgaaaagcagctgtaaaaattcctgtggttttgtcgccactcaaattccaccagatcttttcctgctctgtatgtatccgggttttccatcctacctccatcttgaatccggctatcgacaaaataccgatacagtgatacgcccgccagtgcgataaacacaaccgccgacacgatggtcagagcgattatggatgcttttttcacttcaaatccccgtcgtcaaacggatcgccgcattccgggcagaacttgggcgggtgtgtcgggtcagccggctcccagccgcatttgtcgcatttgtactgcggaacaccggccggttttggtttgccgcattcagcgcaaaactttcctttgttcaccgcaccgcagctacacgtccagccgtttgcctgcgattccggctttttggtgccgcattccgggcagaattttccgcttgccgtcgcgccgcactgcgggcatttccagctttcggcggcaggctttggctccggctttttactgccacagttcgggcagaattttccggtaataccgctctgtccacacgaacagttccatccttcagcagctgccggagccggagcaggctgcgctgcttgctgctgtgcgcccatctgatagagattctgcgcgttcatgccgcccgcctgacctgccatgttcatgcccataaacgccattgcggggcctgcattctgattcgacgccgcagattgcatcgcggaagcctgtgcaccgacaagataggctgccgctctcgtcggatccataaacgccgcattacgctgcagctccttaatcatctgctcatcctcttcgctcgccttgaccgacgaaacgccaaaggaaacgatctcaagtccacgcaggcagcgccattttccggataaaacttcattcaatgcctcggccagttccattgtatgaccgggtagcgcggaatagcggattcccatgtcggaaatcttcgcaaacgcgggctgaagcgccgtcaaaagctcggttttcagctggccgtccagacggtcgcgggtatagtcttcactgacgttgccgcatacgttcgtgtagaacagaatcgggtcactgattctgtaactgtactcgccgaagcaacgaatggcgatgtcaatgtcaatgcccgcgcgctggtcgacaacgcggaacggcaccggagagggcgtgccgtacttattgccaatgagctctttcgtgttaaaatagtagacacgctgatctttgggcggctcgccgccgaaagtaaagcgtttgccgatattcttgaacgtgtctaagatgctggttcccaactcaccggagaagatcgtcggctccgtcgagctgtcatagacaaactcacccggcacggcgcaaagctccgcaaccttgccttgatcaacaataatcatacactgtccatccgccaccgcaacgacggaaccgttcgagatgatgttttcgcttccctttgtgttgctgctgcgtccggaaacgcgccgctgtcctttgaccgccataacgttttccggaattgattcacagtaaaaatactctttccattggtcggccattacgccgccggccgcacccaatgctgctttaatgagtcccattttctgtactccctttctttaacttactatgcccacgggtcttccgccgcgggaatacggataccgctgagaatactggaatattcccagaggaaccattcgccggtcgaagccttctgccgcaatttcatgggacgcggtgaatccgcgccggacgttttaagaaacacgcgcatatagcccggctctatatcctgaggtctggggtctgccagcacgttcagcgtgtatggcacgcacggctgatacccattttccggcgttgcgccttcaaaatatgcaagcggcagataggccttgccgcgcagtcggtcgcgcagaaactgacagtcatacggtgtcatgggcttaggaccgcgcagaaggttcatcgcagcaacgcctgcatctttgtccctgtcaaacagcgccaatgcacacagaaacagtgcgcagatatgttccggctgccgccctttagcggcaagaatttcaaattcctgcaaatttcccggaattttctgaattacaacctgcaacataaccactcctttctaaatgtatatcaatcacacctgtgaaatagatctgtgatcccagcgtgtaatagaattatcaatctgccaatctttcatgaacggtcgctcattggcgggacgcgctgtacgatgagctcgaactcttcactatccggaaagaatgtccgttaaacctgtctttttttctttctccaaacgagtagaaaaacgacgacagcaacaatcaaaagcgttggcacaagtgtgaatacaaggatttttcccacggagaagctgtactctgtcgcctgcacattgttcttttcttgcttttgaggaacatctttaccgacagtgttcacaccaaatccgttcttttcgcctctatctccattctttccgtcgctatccgctgtccccgaaattgatgcaccgggtgaagccgtaggcgaaatacccggcgaggccgaggcagctgcattaggcgacgccgtgggcgaggctgtggcggatgtgtgtggtgaagccgtaggcgtaaccttcggcgtaggagtaaccttcggtgtagctgtggcggatgtgcgtggtgaagccgtgggtgccggagtcggtgttgcgcgcggagccgcagtcgttcccggcttgagcttgggaattggatttgtgcgtatcgtgccgcacacattgcacatccattgcataacgccctcttggcttgttgtcggttgtgcgaccactttcccggcgtcccaattgtgatccgttttggcggcttctcggcgctccgtcacaccgcagtacgtacattcgcgcgtttgaatgcccttttccatacaggtgggctgcgtcgtagtaaaccatgcgccgaatttgtggtccgtcttggcaatcgattttgtctccgtcacactgcattgcgtacactcccgcttttggatgccgttcgccatgcaggtgggctgcgtcgtagtaaaccatgcgccgaatttgtgatccgtcttggcaatcgattttgtctccgtcgcaccgcagcgcgtgcactcacgcttttggatgccgtttgccatgcaggtgggctgcgtcgtggtaaaccatgcgccgaatttgtgacccagcgcagacattgtgacggtgtctccttccgtaccgcagtcatcacagataaaacgggtgtatcctgaagtagtacaggtcgcgaatacgcggttatcaataacccaaaaatgatccgttggcggtgcgggcatttcataccacttgttgcatgtactgcaatacgctcgcttcgtgccggattgtgtacaggtaggttctttaccctgaacaacttcccacggtccaaagctgtggggcatggcagggtcagtttgataagtgcatctcatcccacagacggtacattccagtacatagtatcctcccctcaggcaggttggcttttcctcatcggtctgtataatgttttcatgatgttccggattactgtcttccggcgagcacgcaagcgcggtaatcgcggacagcgccgccataagcgcaaataccagaaatatcagaatcaatcgtagtagttttttcatttctcacccctcctttcaaagcgtgtcaattacgcccgcgaggtaagtcggcgataccgatgcataaataaagttatcaaccagctgatcctttaccgcctgccgcacttcggaggcaagcagtttatccgcgtcctcatccaccaaaagcagaaccttacacgtccaaccgagttgctttacggcactgcagatcttgagtctctcactcagcttccagattccctgtcggatgacctccatcaccaacacattggcacggcaggtccggcacaacgccagcgtttcttccggctttgaagaacggtagataagaaaatccgggtcgcatcccgaaagtgattgcatgaccgcctccgacagaagtccgcccttcatatccaatacaattcttcgcatctgtgcttttccaccgcctttctcttcctttgaatccttcatctatattttagccgttatcttccatttccgccccctccaattggataggatttgtaattattttccgttgcaaagccaaattttgtcacagttctctgtataaagagaacaaaacgtgttgccttttgcctatccgcatgatatactatccatataaatatactgattttttgggggcatgcggcatgagcaaaacgacgaaaagaagccttttgtacgccttgggcttgctggtgctcattgcgtttgccatgtggctccgatatgcaagccggtattattttcattctccggctgtcagctacctgcgaagcgcaatctatttgtttttgttcggcgtgtggtgctactctctttgggcgcgcatcgtacaggtgcaggtgcggcactacatgctggcgatttcggcgctgatggtgctgtggattctgctgcgctcaatcaagttttccattgataacacggatgcagaacgcctgctgtggtattcctattatttcccgatgctgtttatccccatgctgtcggttttcgtttcccagtcgctgggcaaaggagaggattttcgtctgccgcgatggacaaaacttctgtatcttccgacattgctgctgcttttgctcgttctgaccaatgatctgcaccagcaggtattttctttcccgtccggcattttatcggaccgggagtatcggtatgaggtcggttttttcttcgtgctgggctgggaagttctgtgcgcagggtttgcgtttctttcgatggtgaaaaactgtcgtatcccgcatagcaggaaaattcgctggttgccgttggttccgtttgcgctttcgctggtatatgtttatgcgtatgccaaaaatgtctattgggtctgggtgctcgcgggcgatatgaccgtgtcacagtgcctgatttttgcaagcatccttgaatgctgcattcaaagcggactgattcattccaacctcggatacgatgagctctttgaagcgacgagcctgcctgttcagattaccgatcaagcgttctgctccaaatatgtatctgccgccatgcaggggactttaccgcaaagtaagctaaggcatatacagcaggatatcgtctatctggatgacgatacacttttgaaacggcacaagttgcgccgcggctgggtattctggaaggaggacatctcagcgctgagtcaggttcaaaagaaactggaattgacacgagatgagttgcatgacaccggcgacgttttggcggcggagaatgcacagcatgcaagatggttgaagctgacggagtaaaaccgcttgtatgatatgatggaggcacagattgatcggcagatcgcgatgctgtgggatctgctggctgaattgcagaaaacggaggaccaaaaccgggccaggcggttgctcgggcaggtcatcattatcggaacctacatcaaacgcagaagcaacctgatttttgtcggcgcacagcgcggtgcgatcagcgtgcaggagcttcggttatgcctcaatgaatcttccgagaatatctgtgtctatggcgccgactgtaaggcaattgtcaagggggatgaccagcttaccctcgaacaggcgacgcagatctacgacctgtttgaggccgtcgtggaaacggaactggattcccttcgtgcaatgctgatctccatagatgtcggtgcgcaggtagaagtatctttttgtgtttcagcggcagagccgctctgcgggctgcgcgcgcattttcaaggtttggaatgggagcaggatgaggacgggctgcaatatgtgacgcggaagctggaaagatcgaggaggtaaaggcgcatggataggatcaaggaaagttttgacagtctccccatcgcggcctgctttttcgataaaaacggcgtggtgcggctcatcaaccgccggatgcttgccattacgaactggctgcaaaaaggcggtatacagtcgctggcagagatgcaaagcgccctgcaggcgccgccggcaagtgtgtgctgtctggatccgcaccttcggatttaccgctttccggacggaacagcgctgcgctttgcgcaggagcagatcacaacaaaagcaggtgcccgatatacacaaatcactgccgcagacgttacggagctgattcagaagcagaaccagctaaaagcggaaaatgcgaaactggagaaaacaaacaagcggctcaggcggctgcttgcgcagatgccggagatcatccgggaggaagaaacgctggccatgaagttgcgtgtgcacgatgacattggacacagcatcctcgcgacgcggcgcgtgctgctccaaaacacagaccagaaggaaattcgtgcaaccgcagcgttgtgggagcagtccatttcagtgctttaccgctccagtcagatgagagcgcaatccgaaccgttggaagccgcaaaagaacgagcggaaaagcttggcgtcagagttctgctggcaggagatgagccgcgaacgcagcgtatgcgcgcactgattgcactggcaatcagcgaatgtgcatcgaactgtgtccgtcacgccgacggaacagagctgtatgtgtgcttttggcaaaagccggactgtatagcggtctccctaaccaacaacggtgcggcaccaaagggaaaaatcacagaaggcggaggtctttctatgctgcgtcaacgcatagaagaatccggcggcaaaatggagattcagagtgtccctcgctttaagctgatgctcagtttgcaggaaaaggaggaagcagcatatgaaggtgatgatcgttgaagaccagaccatgattcgcagtctgttggaaagctattttcgcgccgaggacggataccggatcacggcgtccattccaggcgcgaaacaagcagtcgagatgtgcaggacaaattctgtcgatctgattttgatggatgtgcaaacagagaaccgtgagaacgggttgattgctgttcgccagattaaagccatacagccgaaaagtaaaattattgttgtgacttcgctgatcgacggcgccgttctggatgaggcaaagaaggccggggccgacagcctgtggtacaaggactcgacgcagaagcgcttgatggatgtcgtccggcaaacactggagggtgaacatatttttccggacgcacccccgacagttgagatcggcatggcaaaaagcacggaatttacaaagacggaactgaaggttctgcggcatctgctgcggggactgtcctacacgcgcattgcggcagagatgggctgcgagatgtcaacggtcaaatttcatgtgtcaaatatgctgcaaaaaaccgggctggaaaacaagcttcagcttgcgctggccgtcagcgacgtcaagttgattgccgatctggcggaagaatgatgagaattgattttcagcttgtgcagccacgcaaaaaacacgaaccccgccgcagaattgctctgcagcggggttcgcttatatgctgaaacagccgaaaagccttattttaagcggttttcaggcatagaaaaagtccaccgtaattctatcaaaattacggtggacttttggcggagaagatgggatttgaacccatgcgccggttacccgacctactcccttagcaggggagccccttcaccacttgggtacttctccatggtgaatataaaagaaaaatgtggcggagaggaagagattcgaactcttggtcccttacgagatcactagttttcaagactagctccttaaaccactcggacacctctccatttcagaacaagtggtattataacacacagagcatgctttgtcaagcacattttttgtgcattttacagagccaacttgactgttattaattatacaaaaaccgagtggatttgtcaagcccataatgggattttgaccgtttttttccaaaacaataaaacagccaaagaaaagcgcttgcaatgcgaaaaaaaatgccgtatactgtttatgaaaaacaaaaggagtcgttgtgaaaatgagcaaagttgaatttgattgcggtaaatggctgcaggaagccgaagaatttgcactgccgaattggagcgccctaccctctattcccctttatatggatcaggtgatgatgtttacaggtgaagcactgtctcttttcgaacgcgatgaaaagcagagtttattgacgaacagtatgatcaataattacgtgaaaagcggcgttgtggatcatcccgtgcacaaaaagtacagcaaggagcatctttctaagctgatgatggtgggcttgctgaagcaggtgctttccattcaggatattgccgtgctgttttccggagatgaagacgcggagcagctttataaagactttgcggcggcgcagagcggcgctttgcacgatacggcagcgggcgtgcacccggaaagtgacgcagcggccttgcgtgcagcggcgttgaagcttgcagcggaagctacggcgcgacaagcggttgcccagcgcattttaatggcgctgtccgacgaaaaaaaagccaagaaataatcaaatttgtaacgaacaaaagcctgcatggcacatagaatgttctattcgaaaaaaggatgggatatgatgtgcgatttgcaggcttttcctatgcgctccggcgaccgattgctataaagtgcagctgttgctctaaaaatacggaatgtcctcctcttccacgcgctgtacttcggcagtgacgtgaaaggtaatttcggcttttgagagcttttctgcgcggctttcccccatttcacgccacacatttggcgcggtgcggaaaatgacttcgctgagacctgcggcatcggctccgtttgcgtttttgagataagcggcgatgtgttcctcagtgtagttggcaagggcagtctcaaagcgcggaaatgcttcgttccctacgtgctttgcggtatttgtgacggcagaaacttcggcgataacatgaattctggcggtaaacttgggctgttctgctgtgcctgtgaagataatgttgctgtttgtgctgcggactttaagcgataccgtgccgaaagcttcgtcttttacggtgaattcgccgccagaaagtgtaccctgcaaggcactaagcccctgtgcttccgccggcgtgagcacggtgcacaggcggtagctttgcagaacggctgtgccgacgggcgtgggcaaatcatcggcgcgcagaacgggcagtgcggcagtggtgtttatgccgtaaagaccgtttacaagctgcagcaaattcacgtctgccgcggccccgctgtattttgcgccgtttgaaagctgcatgaagcgttcggcggtgagatccgtctgtaacaggacgctttcggcggtatcttctgcgaggaaaactttggcggtcgggcgggaatcgtagtggcggataaagaaatccagttgttcggcgataccgctttctgcgcattgcataccgaaaaggatggcggcgttgtgcgaatacagcggcgtgcggccgctttcgagcgcgatttgactgagcgcttcggggacggtatcgccctcaccggaaaaggtgctctgccctccgtcctccgtcgtttcggaagcgagcaccgtcacgcggcagccggttgtcgtgcggtctacgccgattgcgctgatgagcaagcgctcgtaaagctccggtgcgcagcccgaagcggtgagcgtcaaaatgagcgaaagtaaaacggatgtgagtgtttttttcatgcggcgcgtctcctcttctttttgatgcagtcgaaaaaccaaagcaaactcggcagcatagcgccggtcaaaacggaaaacggcagcagatacgctgtgcggaacacggccccgacgcgtgcggcggagtctgtgagccatagggacagaactgctgtcagcgcggctatgagtgctgtcagccacgcgcgcgggcgtgtcggaataggggtcatgcacacggcgatgcagaataatccgcaggcaatacgcacgatgagcgccatcatgctgatgccgatgaaaagcgcgtccagccgctgaatgccggcaatctctgcgatggaagcgagcgtgtatgcggggaaaacttgcaacgcggcgtactcgccgagacacgagacgatgaaaaacagaagcatacccaaaaacacggtgatgccgccgttccaaacgacaaagccgagcacgcggtggcttttaccgctttttgtatccgtatttgtaagaaacggcatcaaaacggcaaactcggcaagcgaagaacagcgcgctgtgaagacgagaaacccctgtacggtttggtctatgccgtcatagaaaagcggcatgagataatgcggcgtgacgttcggagagacggcgagaaaaatcatccccatgccgagcatgaacagcgtgaaaatgcataccgaggcgcgcgagatggtttctataccgcgaatggcaccataaagtgcgatgccgagcacgacaaggacgatggaaaaacgcgaagcgacggggtctgtagtgttgacgagcagcgtcagaaaaagcgaaagactgaaaatgttcatcactataaaataaagcgcgtaaattgcggacatcggtacagaaacaccgcggccgcagttattctctgcgatttgcagaagcgatgcttccgggtggcttttgtgcagcacgaaaagcggcagagaaaacaccgtaaggtacaaaaacagcccgagcgaagagaaaatactttcaatcaaattgctgctgccgacggtttgcacattgattgtgatgctgacgatgacacgtgaaagaaacagcataaggtaaagctgcaaagcactgatcttggttttcacaggtgcttttccccctttcccgcgccgggcatgtgttgtacggaggcgttatggcgcactaatcgtttccatcccgcgcgtacaagcacatcccgcatggcggaaagccgaaatggtgcgaccggggccaaaaacggcacggaaaagcttgttttgccgcaaagctcgaataataaaaacgtaaagcctgcaagcacgccccacacaccccatataccgcccaccaaaataaaaataagacgcagtacagccatgggctcgtataatttcggaaccgtgtacccggtaatgaccgtgacggcgatgacgacgagcgacggtgcgctgacgagccctgcggaaacggcggtctcgccgatgacaagaccgcccacgatgccgacagagctgccgagcggtttcggtacgcgcagtccggcttcgcgcatcagttcatacataaagtaaagcaaaatcgcttctaacatgacgggaaacggcgtactgcgctctgcctgtgcaatggtaacgagcagtgtttccggcagcagctccgggtcgtgtgcggcgataccgacatacagccccggcagaaaaatcgcgaggaaaaacgcgatgtatttcagccagcgcgtgaacgtggcgtaaaacggacggtttgcataatcgtcggcggtctgaaagttttcaacgaagaggtacggcacgtaaagcgctgtgggcgtgccgtctataagcagcccgatgcgcccctcatgcagtttgccgcataaggtatcggggcgctcggtaaaacctacgcgatcaaaaatcgcgggacgctccaagtaacccgccaaatatcctgctgcgagcacgtcttttagattacatgcggaaagccgctttttgagtgtgttaatgatcttcgggtccgcgatgttttttaaatagcacagcgcagccggtgtttggctctcttcgccaaccgtcaccttttcaaatttgagctcggtcgttttgagacggcgtcgtaaaagcgaaatgtttgtctggtaggtttccacaaagccttcgcgggagccgcgctgcataacttccgtatcgggctcatccaccccgcgcgcagcaaagccctgcgtgccgaacgcgagcgctgtcggacagttatcgagcagcagcaccgcaaagccgttcatcatacgttcgagcacttcactgacggtggaaagctcggcttgctctacggcgcacagaacgttttcttcgataaacaaaagcgtttctttgccgttatccgtcggaattttcgcgcgcatcaacggatttaaaatgctcaaagtaatgtgctgcttgctgacgagcccgtccatggtgagcagcgcggccggtaccgtgccgaccataaattcgcgctcgatataatccatggcgttttcaaataacccatttatatatgttacgttttcctttaagtgttcagataagttttccattagcagtttcctttccgcatggttctcctgtgtagattttacagaaaggctgtattttatacgctcgaagacgcataatagcgacgaagacatacggaaaggaaaacgccatgtttatttcgtttgtgcgcacgatcatcttgtattttacgattattttggctgttcgcgttatgggcaaacggcagatcaaccaactgcaaacgagtgaattggtcgtgacgctgctcatctccgaccttgcggtgatcccgatgcaggacagcggccagccgcttttcagcgggctcatccccattttggtacttattgcgcttgaggtgctcgtttcggtttttatgcttaaaagcagccgttttcaccgtttggtgtgcggcaagccggtcgtcatcatcaaagatgggcgtatcattcaggaaaacatgcaggagctgcgcatgagcgtagaagacctttttgagcaactgcggcaaaaggatgtttttgtgctttcggatgtgacatatgccattgtagagacgaacggcacgctgagtgtcgttaaaaaagccgccgtcgattacctgcgtccgagcgatatgggcgtgaaagtgaaagacgagggccttgaagtcgttgtggtgagcgacggagacctttctgtgggctctatgcacttgtgcggcaaaaatgaagagtggatacacagcatattaaaaagcgaagccgtaccgctttccgaagtgtttattctaacggtaaacacagccggacattatacgctcattcggcgggacggcagtctaaaaaagggagtgaaaaaatgaagcgcatggccttttcaatcgttttggcggtatttgctgtggcggtgtgtatctttggttactgcaacacggcaagatctgcgaatacactgattgtgtccgcggaaaatatcgaccggctgctttccgacggcgaagcggaaaaagccttggaggaaagccgaaaattgcaggcagactgggagaaaatacacgataaactgtgcgttttcctgccgcacgagcatttggagccgctggaaaacatttttgccgtgctgccctattatattgagcaggaggaggtgtccttagcgcgcgccgaatgccagatggtgaaaaacacggcggagcacattcaaaaaacagaacgcatcgcatttgaaaatgtgttttaaagcaaaaaacagcagccccatatcgcgttgggactgctgctacataatctgaatttatcggttgcgctcggccttgatcttattgagctcgtccatgaacgtattgatgtctttgaattcacggtaaacggaagcaaagcgaacataggcgacttcgtcgaccttcttgagcttatccatggcataagtgccgatgagcgtggacggcacttcgcggtcgagcgagttttgcaggagcgtttcaatctcgtctacgatgcgctccagtgtttcaagcggtacggggcgtttttcgcaggcgcgcagaaggccgttcaacagcttgttgcggtcaaaagcctcgcgggatttatctttttttacaacgaccaccggcacagtctcaatgacttcataggtcgtaaagcgttttgcacagtttaagcactcacggcggcggcgaatgcgctccccctcatcggttggtctggaatcgatgaccttactttcactgtatccgcaatagggacatttcatggaaaaccctccaaagttctaacacaccaaatctgtctcttaaagtagtgttattatacaacagttttcggggaaaaatcaagcgaaaccgtatacttttttctattttgaccttaaaatcggaaagaaacgtcaaatctctgcgattttcgcccgcagggcgtgtttttgtcccggtttttgcttgatttgaaggctatctttcggtataataaaacggaatatgaaccgaggagaacaactatggcaatacttacggtgaacaacataaaaaagatgttcggcaccgatgtgatcattcaggatattacatttgaagtgcagaaaggcgaccgtattggccttgtgggcattaacggctccggaaagacgacgcttttcaaggtattgaacggagaatatacggcggacgaaggcacctttaccccggcgcgcgaaacgtccatcggctacatggagcagcatgtttgccgcgatatggaaaaaccggcgtttgacgaagtgatgacggtgttcgcgccgctgctcaaaatggaagcagagatagaagtgctcacgacgaaaatttcggaaatgccggaaaaccttaacgagcttatcgaaaagcaggcggagctaaacgatcgtttcatcgcagacggcggcctcacctgccgcaaccgtgcaaaaagcacactcatcggcctcggctttgcgccggagcagatctatgctcctatcggtgttttgagcggcggacagaaagcgaaaattcaactcgcaaaaatgctgctcggcgaatcgaatttgctgttgctggatgagccgacgaaccaccttgatattccgtctgttgaatggctggaggattttctgaagaattacaacggctcgtacatcgttatttcgcacgaccgttatttccttgatgctgtgacgaaccgcacatttgagattgaaaacacgcatttgacagaatataagggcaattatacgaaatatttgcaactgaaagaagaaaaccgccttgcgatgcagcgcgtctacgataacacccaacgcgagatcaagcgcattgagggcatcattgagcagcagaagcggttcaatcaggagcgcaactatgtgacgattgcgagcaagcagaagtccattgaccgtttgcaggcgacgcttgaaaagccggaggatgatccggataccatcaaatttcagtttaaggcgagccagcgcggcggcaatgatgttctggaagcggaagagcttgccctctcattcggcgaccacaggctctttaaaaatgtgaatctcgatatcaaacgcggcgaaaaggtgttcctcatcggcccgaacggctgcggaaaaacgtctttgctgaaagtgctgttgcacatttataagcaaaccttcggcgatttccgctttggcgcgaatatcgacatcggctactacgatcaggcgcaaggcaatttagatgagagtaagacggtcatcgatgagatctgggatctgcacccctacatgacgcagacgcaggtgcgtagcgcattggcggtgttcctttttaaaggcgaagacgtgtataagcccgtgaaagggctttccggcggcgagcgtgcgcgcgtgctgcttttaaagctgatgctttccaaagcgaaccttttgatcctcgacgaaccgacgaaccacctcgatatcggttcctgcgaggcgcttgaaaacgcacttttgggctacgatggcacgctgtttgtcgtttcgcatgaccgttatcttatcaacaagcttgcggataaaatctactatctcaccccttccggcacaacgctgtacctcggcaactacgacgcatatcttgaggcccgtcaaaagcaggaagccgcaaaagccgctgccgaagcggaaaataaaaacgctgtgccgaaagccaatacagtctataaacaaaagaaagagcgtgcctctgaaattcggaagcgccgtgccgcactttcgaaatgcgagcgcgagatcgaagcggcggaagcggaaattgacacgctgaacgagcagctctccaaccccgagacggcgagcgattacgaaaaaatgatggaaatcacgaataagatcactgagcaaaaggcgcttgcggacagcctgatgaacgactggacggagctgacgctttggctggaagaaaacgacgtgtgacgaaaggaaattaaaatatatgatgaaagcaaaggtcatcaccctcggctgcaaggtgaaccagtatgaatcggaagcgatgctctcttcccttttgcagcacggctttgccgcagcggaggacaaggaaacggcggacgtcgtaatcctcaactcctgcacggtcacggccgaaagtgaccgcaaggtgcggcagatttttcgccgcgcgaaaaaagataacccggatgccgttatggtgctgacgggctgcatggcacaggcgttcccggaggacgcaaggcggctggaggaagccgatattatcctcggcacctcgaaccgaaagcgtctggtgccggatctgctggcgtttctttctgcacgccagcgcatcatcgacattgcgccgcacacgaacgacgaaaaatttgagaatctcaatgtggagaattttacgggccgaacgcgtgcatttgtgaagattgaagacgggtgcaaccgcttttgctcatactgtatcattccctatgcccgcggccgtgtgcgctcgaagccgcttgaagacctcaaagcggagcttgcggggcttggtgcgaacggctacaaagaagtggtgctgacgggcatcaacctttcggcatacggacaggagttcggtctgcatctgtgtgacgccattgaagcggcctgcgctacgccgggtattgagcgtgtgcgcctcggctccttggagccggagcagctttcggaagacgtgatccggcgcatggcaaagcagaaaaagctgtgcccgcagttccacctctccttgcaaagcggctgcgatgcgactttaaagcgcatgaaccgccactacaccgcagacgaataccgcaccatcgtgcgcaacttgcgcgcagcgtttgaaaatgctgccatcacgacggacatcatggtcggcttcgcgggcgaaacggatgaagaatttgcggaatctttggcgtttgcagaagagatcgcatttgcgaaagtacacgtgtttgcctattcccgccgccccggcacccgtgcctatgacatgggcgatcagctgacgaatgccgtaaaggaagcgcgcagccacgagatgatccgcgtgacgaccgcaacgcagcaggcgttttttaaagcgcaaatcggtcgcacggaggaagtgcttttcgagcgcgagattcaaaaaggcgtttgggagggatactccatgaactatacacctgttgcggtggcaagcggtacgtcccttgcgggcgagatccgctctgtgcgcattgagaactgcaccgatacgcactgtatgggtgtcgtgttgtaaagttcacctcgaaagacggcaattccctctctatcagaattcatcgagaaatacatgtaaataaaaacgaccgaaagcgctgtgcaaaggctttcggtcgtttttgcatatatttaagtttagaaaatcaaatttacaagcatgccggtcacgacggagcaggcgtacagcgtaccgacgatggcaaggttctcttttacgcggtggtttgtgcggaacagcacgacgaggcccacgcccgcaccggcgcataagcccgccacgcaggagccgaattgcaggctgcccagcgtgaacagctccgttaagattacggatgccgcacagttcggaatgagtccaatgagcgccgtcaggaacggctgaaagacgctgccgtttaaaagtaagccggaaatgcggtcttccccgataaaataaatggcgtagccgagcacgaggtttacgacgaggataaagagaaaaatgctgattgtgtggtgcaaggcggagtgcaacaggctgtggtgatcgcagtcgcagtccgcgcacagctcctcaaacggcttctcttttttagggtggaaaaagcgctgtaaaatgaggtcggccagaaagccgaacacgatgccggaggcgactttgatgagcagcatcggcaaaatgtactgcatctgctccgggtgtgagaacagaatcggcagggcttcatcgcttgtggaaaggaacacggcgagcagtgtgccgactgtgatgatgcgtccggcgtagaaatttgctgccgccacggagaagccgcactgcggcacaacgccgaggatcgcgccgccgatggggccgaatttgccgagcttttgcagaccgcgttccattttgctgcttgcacggtgctctaaatactcaatgagaaagtacgcggcaaacagaaacggcagcgtttttaacgaatcgatgagtgcgtcgagaaagacatccagcataaataaatcctttcaaggtagaggtagcccgtcgaaacgacgggattgcgatacccgaaaacacaaaaagtggtatacaggcttcgagccagtataccacaattttgccggattgacaagtaaaaatcagagccgatttttaccagatttctgcgttttttgcgcaatgttggcgcacttttgctgcccgtacctctacaaagcagccgcacagcgcacacatgccgttgactaagtggtcgcatgatgtgcatttttgcaaacggtctttgtaaagtgcatccggggctttttgctccgggggaatgttttcgatatattcgtagatcgagtgaaaataatctgtgtcgctgaggtctttcagcaaacaccgcctgcagggaatgcgttccatcaggagaccgtgatctccatgacggcacacgccggaatattgaagtgcaggttgttgttttcaagcatcagtgcgtcgaaatccgtgatcttgacgtcttcgggatggtcgaagtcgttgtatgcgccgatggagtttgtcaaaatgcgtgcagatgccgtattgtacttcttgccggtcagcgtacagtcgatcgggtacgcggtgtcggcggaaatgttcgcgagcgtgatatgcacgacgccgttttcgtcttccgaggcggaaaccgtgaggttcggtacgccgtcgtagaccccctccgtttcgagatggctattcaaaagcgttgcatcgtgatggtgcttataaagatcgaatacatgatatgtcggcgtaagcaccattttttctccctcggtgaggatgacggactgcaaaacgtttacaagctgtgcgatgtttgccatgacgacgcggtcactgtgtgcattgaaaatgttcagcgttacagcggcgacaatggcgtcgcgcatggtattctgctgatacaggaagcccgggttcgtgcccggttccacatcgtaccatgtaccccactcgtctacgaccaggccgactttgtgctcgggatcgtaatggctcataatctccgtgtggcgcgtgataagctcgtccatgtacagtgccttgcgaatagtctcgtaatacgtgttggtatcaaagcctgttgcagctgtttttttctcaaatgtgcccggcacggtgtaatagtgcaggctgaggccgttcatgtagttgcccgcaatgcgcatgacctcttctgtccagttgtaatcgtcggcgatgcccgggccgcaggcaatgcggaacacgtggttgtcgccgtaatcgcggacgtaggtctggaagcggcggtagaggtcggcataataggacgggcgcatattgccgccgcagccccagttttcattgccgacaccgaagtatttcactttccacggctcggcatgaccgtttttggcgcgcaggtccgccatgggcgaaatgccatcaaacgtcatgtactccatccactcgctcatttcctgcacggtgccggagcccacgttgccgttgatgtacggctcgcagccgacctggcggcagaactctaagaattcgtgcgtgccgaaggtgttatcctccacaacaccgccccagtgcgtgttgaccatctttttgcgtgtctccttggggccgatgccgtctttccagtggtattcatccgcaaaacagccgcccggccagcgcagcaccggcagcttaatagctttcagtgcttccacaatatcggttcgcatgccgtttacgtttggaatgtcgctgttttcgccaacataaatgccgttataaatgcagcgtccaaggtgctcggaaaaattaccgtagatattgcggttgatcttgcttttcttttcgtcagtatgaatggaaagttttgccattttaaaaattcctccacttaaaatcggcgataagcatcgctgtgtgtatgttcaatatagcatacaagagtacgaatgtcaagagttgtacgtacaaatatttatcggcgcgcgtcgaccgtccaatgctctgtgatgacatggttttccgcgacgagtacttcgctgtacaacgccgtcgttgggcagatgtgcgtcgggatcacgtagaaaacgtcaccgatcttcggacgctcgttttcaaagccgggcttcatgcgccatgtccagtgctcttcgctttgaaacatcggctcggcgttttcaaggccgacaactttgccgcgcacaccgggcgggtcgcttgcgatgcccttgcagccgaggtcaaatgtgaacacgccgggtgccgggtgactgatgacacgcgtgcaaacagctgcggcggggatgtacggcaggtcaggataattttctttgtagctgctgtcccacaaaaacacggtgccgggcgacaaaaagatatccgggtttgcggcgtgacatgggaacgacggactgccgcccgcgatgatcatcggcacctcaatgccgtcttcgctgagtgcatcgagcacatcggcaatgctttccaccatgtccgtcacctcggcttcgcgatccatgaggtcggtggtgtgcacgtggccgtcatagcaatgcaggccgctgaatggaacattttcggacggattttcgagtgctgctttgatgaattcgtaaagatgcgccgtttccacgccggtacggttcatacccatgttgacatccgcaaaccagccgagcacagcattttgcttttcggcttcggcttgaagcgtatgcaggcagcttaaatcatcttccagcgcgtagaaatgcgttttggggaattcctttacgagcgagataaacgctttgatgttcggcccgacaagcgggtaggcgagcaaaatgtgctctgccccgcattcggcaaccattttgacttccgccaaagtcgcgcatttgaagcgatgaatgctcatggccatctgcatttcgatcatctttttcattttatgcgacttcacatgcggccacagtcgctctgccccgccggcgatttcgattgtcttgcgggtattttcgaaaatttcgtctttatagtagatcaaagcgggcgttaaaatgttctctacgccttgtatcgtatagagctcagtctgcatttgtgcagtcctcctcaatttttttattatattcagtatacgctggtaaaattgccctgtcaagccttgataagttctgcatgcagctgtaaaattatgctgattttctatgattgggaggtatgcgttatgattttgtttcgtcatgcgcagatttatgacggcacgggccaaaagccgtttttaggcgatgttttggtaagaaacgatcgcattgcggaagttgggcaaaatttggaggtgccggaagatacagaaattttggaggcagacggcaagctgcccatcgagattgaagcgatttttgagctgtgcgaataattaaaaatcgcataaaaacagcacctcgcaaagagctttacggttctttgcgcggtgctgttatgttctatcaaagaaaaaacgggtctgcacacaaagaagctgacccgtttttctgtacgaaatagggcttaaacctgcacatctgccggttcgggcacatcgtcgttgatgatggacttcttcttccaacggcccatgcggaacgcgatggaggtaagcacggcacccatgacccagcttatgagcagggagatgaacagcgcatctgcagagtgcatcagtgctgcgaggccgtatgcgatcggcacacggatgacgacggtcgtgatgagggagatccacattggggtcatcgtatcgcccgcgccgcgcataacgccggaaaggatctgcgtgacggccattgcaacgtaaccaatggcgagaatgcgcatcatgtgcatgccggtatcaatgacttccggcgtgctcgtaaacatttccatgagataacggccgaagaacagaatcagcgcaacaagtaccacggaaacggaaaggccgagctttaagccgtcctttgtgcccttttccacgcgatccaaacgacctgcgccgatgttctggccggtgaaggtcgtcgttgccgtgccgaaggtgaagttcggcatcatggcaaagccgtccacgcgcataacaacggtggaaaccgcgatgatcgtggtaccgaagctgtttgtaagggactgcacgaccagcatggcgagcgagaacaccgcctgtgtgagaccgctgggcagacccaaacggatgagctggaacaaaagcgcttttgtcggccacagggtgcgccacgtgatgtgcaacacgtcacgcattaagagcagacgcacaagacacaggatgccggagactgcctgcgagatgatggttgcccacgcagcgcccgcaacgcccattttaaagcccgcgacaaaccagatatccagaccaatgttcatgccgcatgccacgagcaggaaaatgagcggcatgacggaatcgccgaggccgcgcagaatgccggaaataatgttgtaatatgcgctgccgagaataccgaggagaatgatgatgagataatcacacgacatggtgtaaatatcctgcggtgtttgcagtgcagacatgattggatgtgtaatgagcgggcccacgaccatgatgaagatggaaaccgcaaaggttgccgtgatcgccgtacctacagaatgcgaaagtcgctttttgtctttcgcaccgaaatactgcgacgccatgatgctggcaccgaccgatacgcccatgaacagtacgagcagcaggttgatgatcgggccactggcgccgatggcggccaacgcgctgtcacccacataattgccgaccacgatggagtccaccgtgctgtacagctgctgcgccaagttgccgatgagaagcggtgtggaaaaccgaatgagattcgtcgccgggttgcccaccgtcatatcctgcgctccgaaaaatgcagagagctttcctgccataataaagaatatcctcctcgccctgagatatactcgaaatttggtgattttgcaagcatatagccttacaaaatcacttgtgttttattgcttccgaatattctccaaaagatttaacgcttaacagtatatcaaaaaaggcgaaagaggtcaattaaatacaaagaagataattaaattttggtattttgccgaatttaatggttgatttatagcgaaattagcagacaatttcgtcagagattcataacgcggaacggtgtgtgaaaatgcgcttctcccctattttgcggcgaatgtattggcttttttgcagaacggtcattgccgttctgcaccaaatggcgaaaagaacgcggcgggcatcacaatccaacgcagagccgagcacggtaaacagcaaaaggctgaatatgcaaaatacggcggctgataggagcagcgcgggatatgagtcgagtggaagcggcaaagcttttgcggaaaaccacagcaaaacaaacaacgttccgctgcataagaattttcggtaagtacgctgtgcgggtgcatgcagcagcttgtgggaggcgtagaggatcatatcgttcgtgcgatacaaaagcgctgcaatcgtcccgatgagcacgccgtacatgccaagcggtaccacaagcaaaagcgatatgagaagattgatgacggattcgatgacggaacggttctgcgttttttgaaaatgcccggcgtattcgatgatgcgctgcgcggctgcacgtccgtttgaaagcaggtacgtgcagacaaaaagatgcggcaaaacgggatcgagatacgaaatatccgtcacaccggcggtgtagagcttcaaaaacggcagaatgaacacatccgccgtgagatacagcgcaaatgtgagtgccatattgtatgtttcaaatgcgcggtaaagccgcaaaaaatgcgcgcggtcggtgtgataggtttgccccaggacgaacgacacgctgccgtttatggcggagaccgccgtgccgaccatgccgaaaagcatcacgtacatggagtagacgctcgttgttttcagtccgcagacgacagagagcagtaaaacatcggtgttttgaaagatgagcccggagatctggtgtacgagcacggcacggtgctgcgcggtggcggttgtatcgggcggcacggcgcggtcaagccagctatactgttttttggcgtagagtgtgagcagtgcggtttgcagtaagccgcacaaaaagcagagcagctgtacggcgatgagcgaaagtccgcaaattagcagtatgattttgccgatgctgatggaaacagttaaaagcaggttggcgttgatgagcacgtatcctctgccctctgcctgcaaaagcacgcggtattttgcctgaaacagaaagcgcacggcttgtcccatgccgccgagcaaaaccgtgagcaatacggtaaaaaacggcagttcggttttgatgaaaaacggaaaaagcacggaaagcccgcaaacgagtgcggcgtaagcgatgccgactttggcatattcccggcgaatcgcattgaagataccgctgacggcggctctgtcctgttcggcggcgggtttataaagtgcctgcagcgctgccgtgccgataccgctttcaagcaggtcaagatacacaagcgcctgctgtgtagcggagagcaggccgttggcttcggaaccgagctgcacgagcacgagccgcggaatgataacgccgagtgcgacggaaacaaactggctgaaaagcccggaaaaggcattgaaaaagctccttttggcacgcatggctactttacaaacacgtcgcatagcgtgcggatgatgcgctgatcccgccagcgcagatagcggcagcccgcgtgccagatggtgcgcaaagcgggcaagatgacactgccgtcctccggcaggtccttgagcagctgcggcgaaacggcggcgtttgcctcgagtaatagtgcgagcagctccgggtcttccgttttcaaaaagcgctgggcgtaaaaatctgcctcacgcatcaggcggtcgcagcacagcgtgtgaatttccggcaagtcttttttctttgagagctttagctcagcgatgagcccgcgcagataatccttggtgcaggcgagcgtgatacgtttattggaatgcgtgccgttgtagcgataaaccacgtcgggcacggcgtagtattctttggcttttaaaagcgtgcaaagaagaaaaatgggatcttcatagacacgcagcggcggaaattgcagcttgttttcaagtaaaaaattgcgattataaataaagcgggcgaaaaaacggtcgagcggctcatcgcaggcgttatgaaagccctcctccgtgaaaacaaacatggggtgcacatcattccccttggctttttcaatagagccgccgcagaccatggcaccgcttttttcggcggcagctaaaagcgtttcgagcgcatacgggcccggatagagatcatcggcatcgagaaatgcaatgtactccccttttgcctccgctatgcccttattgcgcgccatgcctgcgccggcgttttcctgcgtaaggcaccgtacgcggccgtctctgcgctgggcgttcgttagaacgtctgcggaatggtctgtggagccgtcgttgatgcaaagaatttctatatctgtgagcgtctgcatgaaaacgctgctaagtgccgtttcgagggtgccttccgctttataaacgggcacgatcaccgaaattttgcacatagttcttccctccttcataaaacttaaagcacagcttgtgcagcatagtgcggtttcgtcgatagagctttttaatatcgcgcgtgacggcaccgtgctttttcaaaatggcatattgttcctgcaaaagcactttgttccgaaaatcgattgccgtgtaaaagcgctgcaaggcgtatcgcttttcgatctcgtctaagcacttttggtactcggcttccggcattttgatctgcttagcggtttgaagcaagatcgtctcgtgctctgcgatgcggcgcagcttgtcggtttcggttacatctcccgcagacatgccgttttgatattttacatagccataaagcggttcgtctaaaaaagcgtgcggaaatttgtaacacaccggcagcatgagctgataattctgcccgcgccgcgcggggtagatcatgcggttcggcacggcttcatcaaaacagcgcatgcggatcatgtggcagccggcgcacaccatgccttcgccgcgcagaagataccaaaactgcatgagttcaaaacggtgcgaaaaccgcgcagcctcgcggtagagcggcattttgaggtcgctctcgtcaaaaacgaaagcgtcactgctcaccgcgccgcacgccgggtgctgcagcaggtacgtagcgcgtttttcaacagagcccggtaataaaaaatcatccggatctgcccagcagagaaaatcaccgtgcgcgtggagtagccccgtctgtatcgcgccgccaagccctatgttttcctgcgtcaacacagtatactgcacgccgctttcttttaaaaacgtctcgaagtttttcagcagctttgccgtatcgtctgtcgaaccgtcatcaatgcagatgagctccaacgggcggtaagattcgcttattacggagcgcatgaagcggtcaagtgttttttcacagttatagcacggcagaagcagcgttacgagcggtttttccatcttttccctcctgcaaagtgcggcgaaacgcttttaaagcgtcttcatatgcggccgttttggcacgcagcgtttcggtgatctccgacgcgtggatgcgtaggcgtatccacctgcacgtgacggcagtttcattcgcaatgttttcaatgggcagcacatagggcgtatcgacaccgaaaatgtcttctgcaaggcctttggcttttacagaatacccgagtgcgagcgtgggtacgccggaagaatacgccgcgatgacggcatgtgtgcgcgcgccgatgaacgacgagcacagcgcaataatcgatttaagctgcgccgcgctttggtctttgatgaggcatacgcggccgctgtcttgaaaggccgcgtataattctttaagcggatcgcggtcatcattgccgttttgcacggcgtgcgggatgagcgccacggcactgtctgttgtgcgcaggattgtgccaatcagcgcgatgaggttacccaaaataagctttgcgtttcgtgcacggcgcagtaaaagcgggcttacattgatgccgacggtgttgtgcggctgaaacacttccggaatctccgcaccgcgcggctccagcaagaaagcggaatccgggcaaaaggagacgtttcgcagcccggcgctttgcagcgcgtgcagcgtttgtgtctcgcgcgctgtgatgcggtcaaatgcggtgaggtcacgtagcagagccttactgcgaagaagcttcggttcaatcgaacagccgagcagtatgctgccgcctgcatagcgccgggcgaggttgtgcagccgaatgtgcttttgcatatcttcgtagcagtacacatcgccgccgatagagacgagaatatcgtcgcgcgtgagcgtttgcagcgcggcacggtacggcaagacatcgagcggtgtgtaatcgtttaaaagctttaagcgcagataggcgctccaaaatgcgggcgagcttttgcggatcacatcgcttcgcgcggggcgcacatcctgcacaacgagcgggcgtgctacgccgtatctggcatcttcctccggcgcttcggaaagtagcaccgtgcggccggggcctaaaagcttagaaacggtgcgcacaagcgcttcgcacccgtggtttgcgctgccgatgtggtcatgcagaatgtaacgcacgcgtattctcccctttcaaaatcgattttgcgtgttttgcggcgcggtatgcggcaagatgcagctgcaatgcgggcagattttgctgctttaagcagtgcacgatgcaccgaaaaacgccgtgaagctccgcttcggaaagcagtgcgcaaagcgcttcatctttcatgatctctttggctttcgtgatgggatcaagtccgatatccggcgcgtaaaaaacggagaatgccgtgtatgcactgagttttttgcgaaaaaacggcttaaattccgtgtacttttgctctgtgatgacccagtgtgcaatctctttttgcaaaaggagctgcttaaagtggtctgcttcccggcgcagcgggtgcgcggcgtattgcatggcacagtgcggcgtgaggagtacgcggctgtttgcgcggtaaagctgtactaaaaattgcagatcctcagcaagcgtcatggattcatcaaatacagcgtcgacggaaagaattttctcgcgacgcagaagcttgttccaaagatagccgaaatacccggtttcgtactgtacttgcatgaagcaaacaggaagcgtttcggaatctatgagaccgtattttggtagtgttatgcgggtaatctcaccgtttaaatccatttttaggtagctgcccatgagaatgtctgcgtcgtttgactgcggctcatgcaatgctttttcgagaaagttcgaaaacggcaggtcgtcgctgtctacaaaccacacccactttccggtggcggtttctaaagcgaggttacgtgcgcgggaaacgccgccatggtgttgcgcgagtaccgtgatacgcgcgtctgcagctgcaaagcgttctaaaatgcggcggctttcatcggtggagccatcgtctacggcaagcagctcaaaatcgcgaaacgtttgggtacacagcgtggaaagcgttttttgcagatgcctttcctcattatagacgggcagaatgatgctgacttcaggcatagtgctctctcctttgcagccacaggcacataagcggcgtgcagcggtattgcatgcacaaaagctgtatggcaagtttaaacggaatatgtcgcacaggtcggttttgcagcgcacgtttcagcgcttcgtcgtttaaaatgcggtcgatttccgatttttgttcaacctttggcaaagcacagactccgccgagtgcggcgcaggcataatgaatgatgtgtaggtcgagttgacggctaaaatcgtattccgggcagttttgaaacagtgcgcacagcttttgatgcatacgcttgtagctttcccacgcatctgctttgtgcgttgtggtgatgctgccggggttgcggtggtactcgtaaagcccttggcccttaagataaaagaacgaagcggcgcggtatcctgcacacgcgctgaatagattatcttcggaatatcgcacggtttcgtcgaaccgcaggtcgtgttcttttaaaaacgatgtacggtataaacaaacgcacacggataaaagcgggccgtattcgagattgtcgcgcatgatgagctgcggaaatacgcagcgtttgattttgcgtttgtcgtaatacccgccgtggagcgatgcagagcgcagcgtgggcggcttgccggattctatgcgtatgaggtcgcagaacacaaaatcacagtgatactgctcaatcttctgcaaaagcgtttcaaaaaatgtcggcgatacggtgtcatcggcatcgacaaagccgatgaatgccccgcttgccgcaagcagacccgcgtttcgcgcactgctgaggccgccgtttggcttatgcaaaatgcgtatgcggctgtcctcttttttgagccgcgcgcacagtatggagcttgcatcggtagagccgtcatcgataagtaagatttcaatgtcgtgaaaggtctgtgcgatgaggcttttaacgcaccgctcgagatatttttcggcgttataaatcggcacaatgacgctgatcttcggcataactttcccttccttctgtaaatttcaggattttctccgcttctttatactgtgtgaaatcggtgctgcgacaggcggctttgagtgcttcttgtttttcgttgtcttggatcagcgcggcgagagcatctgtaaaaccgtcaaaatcaagcggcgcgatcatgccgtctgtgccgtctcgcagctggctgtgcgcggtgggaaaatccgtgatgatgacaggcttcccgagcagctgcgcttcccgcacggcgacgcatttgccctcataaacggacggctgcacgtaaatgtcgcacatacgtatgtaggggtacgggttctcctttttgccgagcagcacgacgaaatcttccatatgcacagcttgaatggcttcgcgaatttgggtttcccggtcgccgtagcctaaaatgtaccacttaacgggaaggtcgcgctttaaaagcactgtgcagatttccggaatggcttcaaagtttttcgcttcacaaaaccgaccgacggaaagcagcacggtctcgcccgcttcgcgatacatgccggcagccggcagcagcgatttgcgctcgatgagctcgcgcgcaaggcaattttcgaccgtgacggccttttgtgaaaacgcaggatacatgcgccgaaaggcttccgtgcagctttcggaaacactgacgacatagtctacgttcgtatacacacggcggtcaagctttggatttgggtgttgtgtggcgtaatccgtgtggttccacgcgactttgtacttggcgtttaccttgtgcacaagcgtatcggcgacgccgaggtactgcgcggcaagatcatactcgcccgggatattcggcaaaaacggttgcaaaaatgcagagatatactgcaagtgcgtccacgtgccggtgggttttcgcatgaaagtaccgtacaaaaaaagcgcgagctttgcgagtaatcgtgcgactgcaaatcgcagtctgccatgttttacaagcgacaggatcggctctgtataggcgtggtatgcagggatttccggcagcagacgcacatattgcggcaggtcttttatgaattctccctcgtggcggtacagaaaaacggagacctgcacgcttttgttttcgagcgcttccaacagtccgataaggctgcgctctgctccgccaatctccaaagacggcaaaataaaaagcagttttttcggttccgttttaaacgccgcctttcactttttctttgatacgcggatggtcggcgagcaggcgatgcagcgggcgcgtgagcttgctgcgcagtacggtgcggcggttcatccagcttttggcgtaccagtgcacggcgtaggtgcagtctgtgatataaagccgccccgtggcatcctcgtaggggttaaaatacgctttgggaaagacggctgcgccttgcacggtttgtcgcttgccgtttggctttaagccgcattttaaaagcgcctgtgtgttgagctgcgggcagccgatgacgccgtgcttgccgtcgagcaggggtgcatattgctccagcatgaagtgcacgagcggatggtgtttttctgcgccgaagccgaggccggtcgcaatcatacggtcggtctcaaaggcaaaaaacgcgtgctcgctgcaaagcgggtccaaactgcgcacgagctcgacatctacgtcaaagtaaaagccgccctcgttttcgatgatctgcaagcgggcgtaatcggcgagaaacgcgtactttttctctttacagcacatttcggtgtaaccgttttggtgaatgtcgaaattatcttcgttccattccaaaatcatatagtccgggcagtgcttgcaccaactctctatgcactttttggctttgtccggcagtggtgcgcgaccaaaccagcagtaatggatgattttcgggatcatgcagcctccttttgcgctttatgttcggtgcgcgcggccatcaggcggatcaaaacggaaagccctgcgccaagcggtgtgcacagcattgtaagcacctttttcggtgagcggagcatcagtgcgggctctttcgcgagaaaacacgcggcatcgtaatggatgctgtcgagtaccgtgcgcgttgcagcagccgggtacgtaaggcaaagctgccgccaatatagaaagccacgcgggttttttgcgtattgcttccacatggtgtgcgaggaaccgtcttctaaatacgtcacgtggcacagcacgcgatttaaaacggcgagtttgtaatcgcggtcgatcagccggtattttgcggcgagcgccacgtatttttcatttggaaactccgggtacggcgggtattttcggatgatgtcggtacggtacacgagctttttgtcgcctttgccgccgcccgcatagtaaccgctgagcgtcgtttcggtgaggcccggcggaaagccggtgccgataagcttgccgtttccgtcgtcatcaagcccgatgagcccggcgtaattcttgctttttatctgtgcccagcgcttttcaatttgctctacggcatcctttgccaaacggtcgtcggaatcaaggcaaaggttcagctcggtctcgatgtgcgcataagcggtgttgtgcgcagcgtgcatgccgccgtttggacggtataggtaacggatggtaaatgctttctccgcctgcatccaggcggagaccaacgcggcggtgcggtcggtggaaccgtcatctacgatgagccataggaagtttttagatgtttgcgcttttaatgagcaatatgcttccggcagcgtgtgtgcacggttatacgtcggcgtaaatacggtcagcagaaccatgtgcggtttccctccttctttgggcatccttttgcagataatacgcagtgagcatacgtgcgttttcacaaatgtcaaagctttgtagtacaggcggcgcggcgctgagcaccttactttccgccaaaataacctccgcccacttagaaggcggtgcggaaagcggaagctgccgtgcacgcggtgtttgaagacaatccttcggtacaccgttggagacaaggcacggcagccctgcggcctgcgcttccaaaacggcgagcggcatgccttcgtacagagacggcatacaaaatacatctatcgcctgtaaaagtgccggaacatcttcccgcacgcctaaaaacagcacatacggtgtaagaccgagtgcggcggcgcggttttgtacggctgcccgcttttcaccgtcgccaacaaacagcagcttcgattttgtaccgcatgcgcgcagactgtgcaggacatccaagaggaaagtttggtttttctctttgcgaaactgccccacatgcccgatgagaagttcttcttttgtgatgccgagtgtgcgccgcatgtcttcgcgcatgtttttatcaaagcggaatttttctgtatcgatggcgatcggcagcaccaaaaacggcgcactgccgaacatccagcgcccggcatcttctccgcaggcaagcagatcggtcgcggtacgcggaatgatgcgcttatacagatcttttattggatatttgaagtcgcgcagctgatttgtggtgtgtgcgtgagcaatgcgtacaggcacgccgtgctgcttggcgcaaccgagtacaacgccggaaagacaatcaagatgggcgtgcacaacagtatacgccgggtgggcggagaaaaatttgtgcagtgcatggcggtatgcggggctgaacgggttttgccgcggcacggtgaaaactttgccgccgagagagtaaatctctttatcgtacgcgccttcccgtgcgcggtgcgtcagaaaatcgaactgcacgcgtgtgcggtctatgtgacggtagtaattcatcagcatcgtttccagtccgccacggtccatgcaggtgacggcctgcaaaacacgaagcataacggatccctcctttataaaaggccgaaggtcttcagcccgtagaaatagaaaaacagataaaaaatgagcatcatcacggttaaaatgcgcacggagcgttttgaaaacatgtggtgcagctcccatggcagcaaaatgtagttataaagtgaaaagtatatgggcagccgcccgacaaaaatgccgcttgtgaacgctgagaggatgtaaatgccggttgatacaatggacatgttgacgcaaaggtcgatgagtgggtcattttctgcacggataaaccgtaaaccgatcaaagaaagcaacgtcggcacagcgtagaccagtacgcgcagcaggtttgtaccgttgtcctcaaagcctttccaatcgctgacgacatttttgtactgcgtttcctgcaaaagcagctccaaaatgtttgtgaagcggtcgatgaaaagcacgaccaaaacagtgagcagaagaaacaaaagcgtttttcggttccatgcttttccgcgtgtgagaaaaacaaacggtagtgcgaacagtgccgaggcatgcagtgtggcggcaagtagaatgatgagcgtggcttgtccgtatctcttgcgcagcaaaagcggacagcaggcgaacacgagcgccgccgccaaaaattgccgcatgccgttcatcatccaggagatataatccgtggaagcgatgaacaaaaacagactgatgcagtagctttccgagtaaagccgatagtttttaacgagcggccagagctgaagtgcggcgagaatgcaaaaccaaacgcgcacctgcccgccgcacaaaagcttgatgagtgcggaaagcaggaaaaagccgtgatctttctgtaaagactggatgtaatcgggtagtgcgctgaatgtgcttggcatttcggaaaacgcgtgcatgtagttataggtatcgccgatatcaccgcgcagcgtacagaagatgagcagcggcagcacgccgagtgttgcccagagcttcgtgaaccgcactgtctgcacgccgcagacagtttcgctttgctgcacttccaacacggcggagagcgccgtgtaaatcagaaaccaaaggagcatccaaatataaccggacatgtgttctcctctatgccgtgacgcgccggggctgtggtgccgctttttcggcggtgacgatgcgcagtgtttctgcaacaacgctcgctttatcgaattcacgctccattttgcggcggccgttttgcccaagggctgctttttgctctgcggaaagcgccaaaaacgcgcgcatggcaacatataggctgtccgcgtcttttgcgcggcataaaaggccggttttgctgtgctctacggcttccctgcacccgggaatatcggacgcgatgatgggcctgccgacggcggcagcttccagcagcacgttgctcatgccctcgtggtagcttggcagcactacgcagtcgcagttttggtaaaacggcagcggttctttttgaaagccgaaaaattctgtcatgccgccggcaaccaggcggtctacctcctgcctgtactgctcctcaaaaaagccgagcagctgcaaatgcacgtgaaagccctctgcccacagcctgcgcacggcgcaaaacagctcctctacccccttttcgcgcatcaaacggccgacgaacaggaatcgcggcggatcgtgagcggtgtacggcgtgtagatatagcggttcaggtctacacccgcaccatgcagaacgacctctttttcgggtggcaggatgtgtctgcggcaaaattctaccgcattggactgattttcaaagaatacgttctgtacacgcagaaacgaaagcttgtaaagaaatgtggcagcgcagctgagccacgggcgctgaaaagcgctgccgagtccctgtacggtggcgtaaaacggaatgcggtagcacgtgcagagaaaacccatgtatacattcggcttaatggcgtatgtaagcacaagatccggcttttccagacaaagaacacgtttgtacgcctgtaaaagacgcaattcagaaagcacctgcacgcgccgccgctgcattttcgtttccgtgcagcgtatgcccatgctttcaaacacttcttcaccggtttgaaacggcgctgcaacgattacctcataccgggattgcagctcttcaatcagctcccgtcgaaagcggtacagcatataaaaatgatttgccgcgatcaatacttttttgcgcttgtattcggaaaaatcttcgcttatcgcgaagttttcacgtttttttgacataaatttgctgaataaggtcaaatgcagcagatgtgccgaaaagcgcggtgttttgcttttacacattctaaacctccgtatagcaagatgaaatgtatctgtaccggtgctgataccgttattgtacaatgcgagaaaaaagaaagtggtcgaattctttgtgaaagcagacatttatttttgctttttctttgtgtccgtcaagcgaagacgttttactattactgcgggggatttgaatataaaaaagctccctttacgggaaaccgtgcggatgcacacagttcctgtaaagggagcaaaattccttttatgcggttttaaagcggaagcctgcggaaaagcttactttgcgagcttttctctgatgacctctgcaatatgctctgcggaaaggccgaattccttcagcagatccacagccgggccggagtggccgtacacatcgttgacgccgatgcgcgtgacaggcgtcgggcaatgctcggaaagtgcggtggagaccgcttcgccgagaccgccgatgatgttgtgctcttcaaccgtgatgacacggccggtcttctttgcggaagcaataacaagctcttcatcgagcggcttgatggtatggatattgatgacttcaacgctgatgccttcttctttcagtgcatcggcagccttaacggcttcctgtaccatgagaccggtcgcaacgacagtgatgtccgtgccctcgcgcagcgtgatgcccttgccaagctcgaacttgtaatcatcgttgttgttgatgctttccacagccagacggccgaggcggatatagcacgggcccttgtgctcaacagcagcgcgaaccgcggcctgcatttcgtaatgatcgcaggggttcagaatgaccatgcccgggatggtgcgcatgagcgcgatgtcctcgcagcactgatgtgtagcgccgtcttcaccgacagagataccggcgtgggagccgacgatcttgacattcagcttcggataaccaacggagttgcggacctgctcaaacgctctgcctgcggagaacatggcaaaggacgccgcaaacggaattttaccgcaggtggccagaccggcagcaacgccgaccatgttgcactctgcgatgccgcagtcaaagaagcgttccgggtatgcttttttgaagatgcccgtcttggtggcagcagcaaggtctgcatccagaacgacgatctccgggtattcagcggcgagcgcggtaacggtctcgccaaagctttctcttgttgcctttttaaccatttcagccatatcagcagccctccagttcatgcagtgcagcggtgagctcctgcatagcggtctcatactgttccttgttcggcgcggtaccgtgccagccgacctgattttccatataggaaacgcccttgccctttacggtcttggcaatgatgacgctcggcttgcccttaacggtctttgcacgtgcaaaagccgcttcgatggcgtcgaaatcgtgtccgtcgatggtctgtacgtcaaagccgaaagcctcgaacttcttgtcgatcggttccgggccggcaacttcgctgaccgggccgtcaatctgcaggccgttgaagtcgacaatcaggcagagattatcgaggttgttgtgggatgcaaacatagcagcttcccaaacctgaccctcttcaatctcgccatcgccgagcagagagtaaacacggtagtctttgttatcaatcttgccggcaagcgccatgcctgccgcagcggaaatgccctgaccgagagagccggagctcatatcgatgccgggggtgcccttcatatccgggtgaccctgcagcatagcgccgatgtggcggagttttttcagctcatccacagagaaatagccgcgctgtgccagtgcagcgtaaagacccggtgcgcagtggcctttggaaaggacaaaacggtctctgtccggatccttcgggttctgcgggtcaatgtgcagttctttgaaatagagataggtgaaaatatccgcagcggaaagggaaccgcccggatggccggatttggcgttgtaaacgccttcgatgattccaagtctgactttggcagccgtgatcttaagctgctgcttatcgcatgaattcatggaagcctcctgtgtttttagcgcccggcacgggcaatcccgtaaaaaccgcagcgcgagtcattatggtcttattatagcgcatttcggtggcctttgcaacgctccacgccaaaatttcgcccgttttttcgtgctttttgcatattcaccgtatgtggagagacaatagccacagcggcgcttataaaagccttaatcggtacgtacagcttttggctgcgccgaaaaaacggaaaggacaaaacaaaatttacaaacggaaaggaacatcgttttatgtctcagaggatcggcaacctgcctgccaatatcaacattatgaaccctgtaccgaacaaggatgcgaagaccatcatgaagctgatccgcacgaatggcaagatctccggctaccagctttcggatggcacagtgctttccaaggcggacggcgtggcgcttgcaaagcagggcggcatccgcggcgtggcgattgcgagccgcaacggcagtgaatatctgcgcagcataccggacggcaaggagagcaacaatttaggtgacctcccaagcaccggcctgcgcggtctttcctaaagaaaagggagcctgtacgttttgaaacgcaggctcccctatttttgtttattttgtgttttcgagcgcttcacggtaaatttgtacggcgtgttcggcaacggcgacgctgtcaaacggctttgccgcagcacgaattttggcttcatccagtgtgtccgaccgtgcagccatgcgcaaaattgcatcttccatatctttcgggtcacgcacattgcagaactcggcgcagtcatcgttcaaaaagctctccgggcctttgcaccgtgtagaaatcaccggcacgccggccgcgagtgcttccacggcaggaatgccgaacgtctcaatatccgaagccatcaaaagggcgtcggtctggcttaaaatctccgcaatttcactttcggtcttgcgcccgacaaaggatacaatgtcgttcagcccgagctcagatgcggtctttttataaaacgcttcctcctgcccgtcgccgacaatcgtatacaaaaacgatttttccgggtgttgctcccgcaagagcttcaaggcctgcaaagcgtcttccatgcatttgccggggcgcagtgcggaaaccgtcgtcaagcgaaaatgtgccgggtctttcgttttttttgcgccgcaaaatgccttggtgttgacgatgttcggcagaacttcggcaggtatattgtgtttttcttttaaaatgtccgtcatatagccgctgacgcaggtcatcacgctgtgccgtgcagcatagagtccgtattttgcggtgctaccctcaaagaagcgctcaaaatatgaggagtgctccgtgatgacgaccggaatatgatatttttcgccgagctttgcagcggcgtatccggcgggcacggtgacatgtgcgtgcagaatgtccggcttgccgtgctgctccacgtaggctttgtaaagcttttcaacggtgcggcagtaagcgctgagctgtgcgtctgtgctgaatttggagatgtccagcatacggcggcagtatgtcacatagccggtgttcgattcttcgtagagcttctgcattgtagggtacttcggcagtgaagacagcccctgtcggtctacatagagcatgttggtttttacgccgtattccgcaagtgccgtgctgaacagcttgtggtaaacgccgatcagtttatcctcaccgtttgggtaccatgtggggatgaccaaaacgtgaagcggagaatttttctgcatgagtcttttggttccgatagcgcgcggtgcgcagtctatcgaaaaatcctttcattcgtagtatggaaaaagctatttaatttctgcgcacgaatgcctttttcggcattttgcagaccgggcacacccagttgcccggcagttcttcaaagctgaagttcgggtcgctgtacacatagccgcacacggagcagacaaagctttcaccgctgctcttatcaaacgtgctttccggcggcacataggttggcgagccgaccggcgacagaccgtgcatttcactgcggtagaaatcatacgtcatcggcgtgccgatggcgctgtcgctgcccgctatgatctcggcggcgaagaccatctcctgccctacgtccatgccggagatgaccttgcataaaaaccagcagcaggtgttctcctttacgacgggtacgccttcaatgagtaccttgtggcggatgtttttcagcttgtctgcatttttaccgctgacaagaccgagtgcgccgatgacgctggcaggtgtatctgtggagagtacagaaatggtaaaaatgccgttttcgcggattgcggtgcagctgtgcgtatcttttgtcagcgcaatgagcactttttcggggtcgctgctggaaatttggatgacagagtttgccacacaggcgttcgggcggccgttatattttgtgccgatgacgtacatgccgtatgacaaatttttaaggactgccgggttcatggcggtgcacttccttccgttatgttaatagagtttatgagctgtgctttcgttttatgttttcccaatacgctttaaacgtctgctcgtttttgttgtctccgtagtgatagtacgaagcgccgagcaaggcatccggaagatactgctggtcgagccaatgatccgggtaatcgtgcggatagcggtaaaactggccttttttagcgacatctgaaccgtcataatgcacgttttgcagcgtgcgcgggatcacaccgagtttgccggccttcacatcgcgcatggcggcatctatggcagattcaccgctgttcgatttcggcgccgtcgccgttaaaatgacggcatccgcaagcggaatgcgcgcttccggcagaccgaccatcatggcggcgtctacggccgctttcacgatggggatgatctgcggccacgcaaggcccacgtcttcgcaggcgcacaccatcaagcggcggcatgcagaggcgaggtcgcccgcttccaaaagccgtgcgagataatgcagcgccgcgtcggggtcggagccgcgcatggatttttgaaacgccgaaagaatatcgtaatgcgcgtcgccgtctcggtcataccgcatggcactgcgctgtgtaagctgctctgcaagttccatggtgatgcgcggctcgtcctcgcttcgtacggcagccgtgcaaagctctgccgcgttcattgctttgcgtacatcgccgccgcaagcggaagcgatatacgagatcacgccgtcttcgagccggatttcttcgccgaggtcttccgacaaaatgcggaatgcgcggtctacggcgcgggcgacctcctctttttccacgggcttgaactcaaacactgtggagcggctcaaaatggcgttatatacgtaaaaataggggttttccgttgtggaagcgatcagcgtgatgctgccgttttcgatgaactccaagagcgtttgctgctgctttttgttgaaatactggatctcatcaaggtacagcaaaacgccgtttaccgcttgcagcgtgtttacctgcgccaccacgtcgcgaatatcggcggtggaggccgtggtgccgtttaacttgcacaggtgcatgtggctttgctttgcaatgatggacgccacggtggttttccctacgccggacggcccgtaaaataccatattcgggatagtgccggattcgatgatgcgccgcagtaccttattagggccgagaatatgctgttgtcctaccacatcatcgagcgttttcgggcgaatgcggtctgcgagcggtgcgttcatcgtgttctccttttagtcgttataaagcggatatttgctcaaaagctctgtgacttttgcgcggatggcgtcggctttgttgtcgaaatcggtcgcacacaggtggatgcactccgcgatgacgtccatatcggcttccttcaggccgcgcgtggtaacggccggtgtgccgagacgcacgccgcttgtgacgaacgggcttctctgctcgttcggaatcgtgttcttgtttgcggtgatatacacttcgtcgagacggcgctccagctctttgccggtcagctcgccgtcggaaagatcgagcagcatcagatggttatccgtgccgccggaaacgagtttcatgccgcgttttgtaaggccttcggcaagcgctttagcgttttttacggtctgctcggcgtaggtcttaaactccggcttcagcgcttcgccgaggcacacggcttttgcggcgataatgtgcatcagcgggccgccctgcgtgcccgggaaaatggctttgtcgatttttttcgcgtactcctcacggcagaggatcatgccaccgcgcgggccgcggagcgttttatgcgttgttgtggtgacgacatcggcatacggcaccgggttcatgtggcagccgcccgcaactagacccgcaatgtgcgccatatcgaccatgaggtacgcgccgcatgcatcggcaatctcgcggaatttcttaaaatcgatcgcgcgcgggtatgcacttgcgccggcgacgatgagcttcggtttaagttcgcacgcctgctccatgagcttatcgtaatcgatgcggtgcgtaacgggatcaacgccgtaagccgcaaaattatagtaggcgccggacatgttgacaggagaaccgtgggtcagatggccgccctctgcaaggttcatgccgagcacggtatcgcccggctgaagcagcgcgaaatatacggcaaggttcgcctgtgcgccggagtgcggctgcacattggcatgctctgcgccgaacagacggcaagcacgctcacgggcgatgttttccacaatgtctacatctgcacagccgccgtaatagcggtgacccgggtagccctcagcatatttgtttgtgagtaccgtgcccatcgcagccataacggcaggagacacaatgttttcggaagcaatcaactccagattgcggcgctggcgtttgagttccagctccatcgcttcgccgacctcggggtctgcggtttcaacaaaaccgatcgtgttcagaagatcaccgtacatacttcatctttcccttctaaaaataatatgctctgcggtttatgtgccgcagtacttcactaaattataccctattccatttaaaatggcaatagatgatttgcaagcacataatggatggcgtaaagcaataacatatgtgccggatagctgatgtagaaaaaatatttgagcgaaagcgcgccgcgcttgctgttatagagcaacacggggatcgcggcggcgatggcatacagctgtgtcgtgttgccgtcctgcgtatattgcccgtaggtcagcgccgcaaacgccacggcatcaataccgcggtacttctggaacaaatagaaacaaagtaccgttaaaacaccgtaaacgccatagctgaaatgcaggaaatacggcaggattgtcaagatcactgcgccgatgaacatgaaaatattgcggcttttcgcggaagcatctaaaagtttcatcacaaaaagcgccgttaaaaacgtgaacaggatattttgccgctgaaactcaagccatgtaccctgaaataaaaggtcatacggcacttcggagagcaaagcaaaaatacccatgcgcagtgcgtagcggttaaaattgcgtgtgtgcatgtagccctgcacgagcaaaaacgcgtagatcggcatggaaagccgcccgatatagcgcagccagataaactgcgggaagaaaatcgccccgacatggtcgatgatcatggtgacgagtgcgatgagctttaaggtaaacgcagacattctttttcccctttgcggttatttgtcggtctttcaataaaaataaatttaccacccttttccggtattgtcaaccgaatgaaaaagttgtagaataaacgtaaagcattcagacgggcttgcccgccgctttttcggaggtttgtatgacaaaaaaggaacgtgcgcttcttgctgtggaagcgctgaaaaaagaatatcccggcgcggtatgttcgcttgaatatcaggatccgctgcaattacttattgcaacgcgactttccgcacagtgtacggatgcccgtgtgaaccttgttacaccggcgctttttgcccgcttccctacgctggaagccttctgcgcgggcagcgaggaagaaattgcggagctcatccgctcctgcgggttatataaaacaaaggctcgtgatatttttgctatgtgccatgtgctgcgcgattcgtataacggcgtgattccggacacggtggatgagctgacaaagctgcccggtgtgggacgcaaaaccgcaaatctcgttgtgggcgacatttacaaaaaacctgccgttgtgacggacacgcactgcatccgtatcacgggacgactcggtctgaccgaaagcaacgtgccgctcaaagtcgaaaaagacctgcgcgcagtcttgccgccggaggagagcaacgacttttgtcaccgtaccgttttacacggcagagcggtctgtacagcgcgtaatccgaaatgtgctttgtgctgcatgaattcgttctgcaaaaatcccgtgaacccgatagagtaaataaagctaaaaaacgcagcgcttttccgttgtgttgttcttgataaaagaaaggaagctactttttatgttcaagttttgtaagacccagctttgggagtgctcccgcacgctttccgatgttgcaatgggcagaaagcccgcagagacggtcattcgcaatgcgcgtctcgtaaacgtctgcacgcatgaaatcctcgacaacatcgatgttgcaatttcctgcggccgtattgcacttgtcggcgatgccgcacactgcatcggtgaaagcacaaaggtcatcgatgccgagggtcagcttatcgccccgggtttccttgacggtcatatccacattgagtcttccatgatgacgccgatcgaatatgcaaaggccgttatcccccatggcaccgtcgggatttattatgacccgcacgaagtctgcaatgtgcttggcctcaaaggcgttgacctgatggcggaagaggcggaaaagactccgctgaaggctatgctgacgaccccctcctgcgttccggctgttccgggatttgaggattccggcgcggagatcaccgccgcggatattgcctcggaaatgaagcacgattataccgttggtctcggcgaaatgatgaacttcccgggcatcaccgcttccgcggagccgacgcacaacatcaccggcgaaacgttgaaagccggcaaaatcatcacaggtcactattccatcccggagacgggtcgcggcctcaatgcatacattgcaagcggcgtgcgctgctgtcatgaatccacccgtgcggaggacgcactcgcaaaaatgcgtcttggcatgtatgccatgctgcgcgagggctccgcttggcacgatctgcaggaggtctccaaggccatcacggagcacaaagtggacagccgatttgcgaccatgatttccgatgatacccacccgcatacgctggttgcaaacggtcatctcgatcacatcgtgcgtcgtgccgtctccttcggtatcgattttgtcaccgctatccagatggtcacgctcaactgcgcacaatgcttccagatggatcacgagctcggctccatcaccccgggcaagtgcgcggacatcgtatttattgataacgaaaaagacatccgtgtcacccgtgtgctcatcgacggcgacgttgttgcagaaaacggcaagctgacgattgacctgccgaagtctgagcttcccgcatgggcgctcgacacgatgcacgtcggcgagacgatcaccccggaaacctttaaggtacataccgataaggttggcacggcaaccgtccgtgcgatcgagattatcccggtacatgtcggcgactatgagcgtcacgttgaactcaaggttgaaaacggcgaattaaagagcgatgtggagcaggatgttttgaagacattcgtcttcgaacgccacaataagaccggcaagcacggcgttggctttgtcaagggattccacgtcaagtgcggcgcaatggcttccaccgttgcacacgatgcacacaacctgctcgttgtcggcacgaatgacgaagatatggcacttgctgcaaacacactcattcaatgcggcggcggtgagtgtattgtgcagaacggcaaggtgctcggctgtgttccgctgccgtttgcgggtctcatgaacacaaagtccgctgaagaaatggacgagctcgtcgagaacctcggcaaagcttgggaaacgatcggctgcgacattcagtctccgtttatgacgatggctttaatccccctcgcctgcctgccggagctgcgcctgaccgaccgcggtcttgtagactgcaccaccttctcttttgcagaccttgaggttgaataagaccgtttgaaagtagattaccttattttagaataggaggaattaccaatgatctatgattttgaaacgctggtttccagaaaaaacaccggctccggaaaatgggacgagatgacaaaagagcatccgaacctgccggaaaacgttgcaccgctttccgttgcggatatggagctgaaaaacccgccggagatcgtagagggtctgaaaaagtacatcgatacgcatatcctcggctataccggccccacagaggaatacttcgatgcggtatgcggctggatgaagcgtcgcaacgattgggatattaagaaagaagaaattgtttctacacacggcgtcgtaacggttctggctgtttcggttctggcctataccgatcccggcgacggtgttatcaccatgccgccggtttattatccgttcagaatgaccattgagcacaataacagaaaaaacgtggagtgcccgctcatcaacacgaacgagacatacacgattgactttgatctctttgagaagctgtgcgcagaagaaaaaaacaagatgtttatcttctgcaatccgcacaacccggttggccgcgtttggacggaagaagaaatcgcaaagctcggcgccatctgcgcaaagcacaacgtcatcgtggtcagcgacgagatccactccgacctcatcatgccgggtcataagcacgtggcatttgcaaacgcctgcaagaatgcactgccgaagtatcttgtttgcaccgcgccgagcaagacgtttaaccttgcgacgctccagacctcgaatattgttattcccgatgaagaactgagaacaaaattccagagtgttttacagcaacacttcacgccgtccgccggtgcgctcggccttgaggcctgccgtatcggctacacggagtgcgaaggttggcttgcagaggtcatcgaccttatctacaaaaactacaagaacttctgcaagttcatcgacgtaaactgcccgggtgttacatacagcgatctgcagggcacgtacctcatgtggatcgactgcacgacgttcggtctcgatgatgaagcgctcgataagctcctgcgcaagcatgatcttttctgcgacgccggcacgctgttctcgcagggcggcaccatgcatacacgtgtaaacctcgcaggtcccgaaaagatgctcaacgccgcgatgcagcgctttaaggacgcgtacgacgaagcgaaaaacgcataagcttgttcctgaaattccgtaatgtataacaaaaggcgaaccgcacaactccgtgcagctcgcctttttgctatgctgttttactgaatgccgagcgcgtctttcgctaaacggtcggcgaggtcgttgtatttgtcgccggagtgccccttgactttcacaaagcggaaacggatgtgctttgcggctgcggcgcagaattcgcggtacgcaatggtgccgggcttttttgctttccattctcccgttgcccattttgctacaccctcgtaatcatggtagattgtcacggagggcacatcatgctcgatgcagtagcgcagaacagtttcggagcccttgatctcccctgccacgttgcgcatttcggcaaggtcggggtcagtgaatctttcggaaaaatgcagctcttcgccgtttaaaaacagcacagcaccgcaggaaaactcctttgtgccgatgtggtagctaccgtctacgtaagccacggcgccgtcttcttcaggcgctgcggtcgtgttttctgccggagtggctttcgtcagatcgttttcaccgcgcatataggcttcggcttctgcaagcgttggaaagcttttgaacgacgcgcctttaaagccggtcgtctgtgcacggcattcgtcccacgtttcaaaaatgccggtttttcgcccggcgcggacggcgtagtatttttttgccataaaatgaaattccttttcgtttattcaaagatcggggtggaaaaataacggtcgccgctgtcgggcagaagcgccacgagcgttttttctgcattttcgggcatgcgcagcaggcgcacggctgcggcaagcgccgcgccggacgtgatgccgacgaggatgccctcggtgcgtgctaatagttttgccattttgtacgcttcttcatccgtgacggtcagcacttcgtccacaacggaagcatcgtagttcttcgggatgaagtttgcgccgatgccctgtaagccgtgcgcaccgcttttgccctgtgtgatgagcggtgaagtcgccggttccaaaccgacggtgtgtacctgtggcagatgcttttttaaatagcgcgccgtgccggtgatggtgccgccggtgccgatgcccgcaacgaaaatgtcgagtttgccgtctgtctgttgtacaagctccggaccggtcgtttcataatgtgcggcagggtttgagggattctcaaactgcgcggggatgaagctgccgggtgtacttttcgcaatctcatccgccttttcaatcgcaccgcgcatgccgtctttgcccggtgtgagtacgatttccgcgccgtatacggaaagcagcttgcggcgctcggcgctcatggtttccggcatggtgagcaccacgcggtagccgcgcgccgctgcaatagatgcgaggccgatgcccgtgttgccggaggttggctctacaatgaccgcgccgggcttcaatttgccggctttttcggcgtcttcaatcattttcagtgccgcacggtcttttacgcttccggcggggtttaaatattcaagcttcaaaagcggcgcgttggaaatgcccgcagctgccgcaaagcgggacgcacgtaaaagcggcgtcttgccgatgagttcggttacagatgaagcgatgtgttcatttttcataagacagatcctccctttctatatcgataccattttacccccgattttacgcgcggtcaagagcgcgatttttgcaaatcttttgcttttgtaagagtttcttaagttgtttattttttggcttacctgtataatagaaccatcagagagtccgcgccgggtgttttgcgcggaggaaaggactgactttatgactaagaaaaagattttcacaatcgccggtattgccgtcggcgctgtgatcgtgatcggtattgtaatctggctcattttcttccgcagcggcagcgttgcgccgagcgacccaaatgagatggtgtatgtgacgagcgttgcggacatcaccggcacgggttcacttggtatgacggcgaaatactccggcgttgtggagccggaaaagacgctctccgtacagaaggacgatacaaagaaaatcgcagagctgtatgtgacggtcggccaggaagtgaaagttggcgataagttgttcagctacgatacggacgacctgcaaatgcagcttgaagaggcgcagttacagctggaaagccttaaaaaccgcatttccacgctgaaccagcagattgattccctgcagaaggaaaagaacaaagcgtcttccgacgaacagctttcctataccctgcaaattcagtctgcacagcttgaagtgaaatcaacagaatacgatcagtctacgaaggcaaaagagatcgagaacctcaagaaatcgcttgaaaatacggatgtcacggcggaaatggccggcgttgtgaagcagatcaatgacggttccaactccaacacaagcggcagcgattcttcaaacgcatatattacgattctcgcgacgggttcttaccgtgtaaaaggcacggcaacggagctgaatgtctattccttgcaggagggcatgaaaatgaaggtcgtctcccgcgtagacccggagcagacttggacgggcaccgtggagagcattgagcgcgaagccgcaaacgacaataacaacagcggcgtttactacggttccgaaagctcgtttacaaaggcgacaaagtataacttctaccttgtgctcgatgatttcaaaggtctcatgctcggtcagcatgtttacgtggagccggatgaggccgaagacgtgaagaccggaatttggctgccaagctactatattctcaacgaaggcagcaaaaactatgtttgggccgtaaacgataagaatcgcattgaaaagcgtgaagtgcagctcggcaagtttgacgataccctttccgaatatgagattacgtccggcgtgacggcagacgatcgcttggccgttgtggaagaccgcgtgcacagcggcatgtacgctacggacgatatttcctatatgaaccagggtgacgattccacggatattgatgccgcaaacggtgacaggaacgatgccaaaacggacgacgcaaacggtggtatgcccgcggaagacggcagcgatatggacggcgacccgaacggctacagcgccatgcccgcagaaggtgctgtaacggagtccgagggcgaaacggacacggcggatggcgcgacgtcgaactttgaaaccgttatcgggggtgctacggcatgatcttagagctgcacaacatttataaaacgtatatccaaggcaaaatggaagtgccggttctaaaagacatctctctttctgtggatgagggagaatatgtcgccatcatgggtccgtccggctccggcaaaacgacgctgatgaacatcatcggctgccttgatctgccgacttcaggcacgtatgcacttgcgggtgagaatatcatcggcaacagcgaatcgaagctttcggaaattcgcctcaactccatcggcttcgtgttccagagctttcatcttttgcctcgccagagcgcggcggaaaacgtggcgcttccccttttatacgcaggtgtgccgaaaaaagagcgacgcgcgcgtgccgtgcgtgctttagagcgtgtaggtctcggcgaccgtgtggattttaagccgaaccagctttccggcggccagtgccagcgcgttgcaatcgcccgcgccatcgtcaacaatccgaaaattcttttagccgatgaaccgaccggcgcgctcgacagccagtccggcgcgcagattatggagctgttccagacgctcaacgacgagggtgtgaccgttgtgatgatcacgcatgatctcgatgtggcaaaccacgcaaagcgcgtgctgcatattcgcgacggtcagtttgcggaacagcatatccccgaggaaaaggaggcgaaagcatgaatctgccggcaaatttcccacttaaaaaagtcatgatcacggtggtctccgtagtgatcgtgatcgcgctgatcatcaccggcgtgacggttgcggtgaacggcaaggcggcaaatgccacggtggatgtggagcaggtttcaaatatctccacacagtattggggtgaccagtccagcacctacggtaatgctacaagtgactttgtgcaggaactttaccccgataaagaaaaagctatttctaagattttcgtcaaagagggcgatactgtcaagattggcgatacgcttttgcagtatgatacgacaaagctccagctgaaggtagagagcaaggagcttgaagaaaaaaagaagaaatacgaactggagcaggccgaaaaagaacttacgaagctccaaaatacggcgccgtatgtggcgccggttatcccggagcccgagccggaacccactcccacgccggtgccggaatcgcaggcagaactgtatacggagattacagagcactcgaagccgtttaaaggtgccggtacaaaggaagacccgtatgtctttctttgcacggaagatgctgtgctgacgaagggctttctcttgaagctgctcggcgtgacagacccgcgtgcgacccctacccctacccctactctgacccccacaccgagcgcagagcctacggcacagccgagtgaagtgcccacggcggcgccgcagccgacggttacccccgaaccgactgcgaagcctaccacagcgccgacggaagcccctactcccgcgccgcccatagaacccacggaagcccctactcccgcgcccatagaacctacggaagcgccagcggtttccggtatggcgtggttcaagcagatgacattcataaaaacgaatgagaccggcggcgaaagcgtacccacgccggagcctgatttcacactgccggacggcccgtttgtcgcacgctttgaagtgcatgaacaggataacgaaaatctgccgcttgtaaagggctggcagatggacggcgataagatttccgcgggcttctttaatgaagttatcagcgagccggatgatattcaaatgccggatctctccaacgccgatccgggcatcagctacgataccggaggctccatgtatacggcggaagaattgcagcagatgatcgccgataaaaagcagcagattcaagatttaaagttgaatgtgaaacaggcggcgcatgaccttgaaaaagcgaagctggatcttgaaaacgctacaataaaatcgaccgtgaacggcgttgtgaagtcgctcacagatctcgatacggcgatgtccacaagctccccgttcctcgtggtttcgggcggcgacggtttctatataacggcatccttaaacgaatcgctgcttggcaaggtgcatgtcggcgatacggtcatggcgagctcttgggagaacggacaaatgtatgaggcagagattgtacagatctccgattttccgaatgacaattccaattattactatgacggctcctcaaacccaaacagctccacgtaccagtttacagcgcgcattgccgatgcggacggcctgaaaaacggcatgggccttgatattactttgcaggcggcctcagataacgcaagcaatgcaatatatctttttaaagcgtatatccgcagcgatgacggcggcaagtatgttttgaaggtcggcgacgataaccgtgtgcataaaacgtatatcaaaaccggcaagacgatctacaaccagtatctggagatcaagagcgatactttgacggaagaagattatgtggctttcccctacggcacttcggcaattgatggtgccaaggcgaacgacatggaagaaaacacagacgaaaatgacggcatcgacgcaagggggcttgacgcatgattgaaaatatcagactttcatttcagggaatctggtcgcacaaaatgcgttcgttcctgacgatgctcggcatcatcatcggtatcgcctctatcatctccatcgtgtccaccatcaagggcacgaatgagcaaatcaaaaagaacctcatcggctccggcacaaacacggtgcagattcagctgtatcagggtgattatcagtacgaaatgctgtataacggcttgccggacggcatccctgtgcgtgacgagaccacgatggaaaaaatcaagtccgtaaaaaatgtggaagatgcggcgttctataccagccgcagcgactacaacaactccgtttactacggcaacaacggcatttccggctcgcaggtcttcggcgtggataacagttatttcacgacgaatgggttggtgctgaaaagcggtcgcacctttgtggacagtgattttacggatttccacgcggcagccatcatcgatgccgatacggcggattcgctgtttgacggcgaaaaccccatcggaaaaacgatcgagatcagcagcattccgtttacggtggttggcgttgtggatgaaggcagcaagtttgagcccgtcatcaactccatcgatgagtattatacgtattactcggatagctctgcctcccgtattttcgtgccaagctccatgtggccggcgctctattcgttcgatgagccgcagaacgtggccattcgcgtttccaatacggaagccatgacggatgccggcaaggctgtggcggagatcatgaacacgaacgtgacgaacggcgagatcaagtatcaggcacaggatcttttaaagcaggcgcaggacttgcaggatctcagcagctccacaaattcgcagctcatctggattgcgagcatctccctgctcgtcggcggtatcggcgttatgaacatcatgctcgtttccgttacggaacgtacgcgagagatcggtctgaaaaaagccatcggcgcgaaaaagagccgcattctgtggcagttcttaacggaagccgctgtgctaacaagccttggcggcattgtgggcgtgggtgccggtatcggtcttgcggcaatcatatcgcgcgtgacgtctgctccggttgccatcagcgtgccttccatcattattgccgtggtgttttccatggtcatcggcatcatcttcgggcttctcccctccttcaaggcggcaaacctgaacccgatcgatgctttgcgacatgaataaaaactaaagatttataaaaatgccagccgggctgaccgatgtgatcggaaagcccggctggcatttttgtgttttgaattactctgctttgtcctgctctgcggcctgaagaaatacttcgtgccatgcgggaaaatgcttctgcatacggatcggctttaacgcgggtgttgtgaagcagtgctgcgaagtgccggtgcaactcaaaagcccggtctccttgctgtgcccctcatacgccatttcaaagcgtacaccgttgtagttttgaatgcgcagtgtaagcacaagcgtctcatcaaagcgaattgggtgtttgtagttgcacgaaacaccgagcacggggatcagaatgccgttatcttccatttttttgtacggcaatcccatagcgcgtagcatctccaagcgggcttcctcaaaccaacgaatgtaattcgagtggtgcacgatgcccatttggtcggtctcgtagtaattcgctttgcgttcaaaggtgaacatggcgcggcctcacaggtgcatttcgatgaggtttgcgtaaaaagccttatcgtgtgcgccgacttcagtgtggatgggtgcgccgtctttaaagaggatgacggtcgggatgctggagatgccgtattcggcggcgatttcctgcgcttcgtcaacgtcgatcttcgcgacgacggccttgccctcgtattcttctgcaacttcctcaatgaacggtgcgatcattttgcacgggccgcaccatgttgcaaaaaagtctacaagaacaagcttgttatcgcggatcaatgcgtcgaaattttcagctgtgggatgtacgattgccatggaaacttcctccttaaaatgatttggcattatactaaatttgtttaagaaatttattcgtagggtacgatttctgcggagagaatggtgacgtcttcaagcggcttatcgttcgagtcggtctcaacggccatgatgctgcgcaccacgtccatgccgtcaaatacctgtgcgaacacggtgtgtccggtacctgcggtggaatatgcaccgtcaaggtgtgtgttgccgccgtttttatcgtaaagttctttgtaggcatctgttactttgtccatatcgagcgtgccgccgtacatggaggtgaacttttccggtgcagatttatagacctgataatactggtcgtaggtatcccagtctattttgcccggttccgtgcagtttataaaaaactggctgccgtttgtgttggcaccgctgtttgcacaagagaccgcgccggtgatgttgacgaggtttttgtgaaattcgtcgtcataattctcaccccaaatgctctcgccgccggttccgttgccaagcgggtcaccgccctgaatcatgaaatcatcaatgacgcggtggaaagtgatgccgtcatagtagccggaaagcgccagagatttaaagctgtacacggctttcggtgcggcatccgggaaaaagcgcatgcgaatggtgccgtagttcgttgtcagcacacaaatctcctcgcctttttccggcatatcgagctgatagccgagcttttctttgtcggcctttgccaagggctttaaggtatctgccgcaacaactttatccgtagtgccgatgaccttttctgcggcagaagaggtgctgccggagcaagctgtgagcagcatgattacggtcaacgccgcacacagcagtttcattttcttcatttttctgtttcctttcttttgcaaagacatactttgcatctgtatatctattttaatatacacggtaaaaacatgcaagcccttttgtttatcttcatgaaaagttcagaaacgcataaatgaaagtttaggttcatatacttcggcgtagttaaggcgcagccgaaagcgttttttgcgcggcacggccttaaaaaggagtgaagtacatgaaattttacccggaaggtcatttgatcgacaaagcggaaaacaaagccagtatgcagacgcctgccgccctctccgacgcaatgcgcgacggaaagatcttagaggcgcgcagcatcatctgcgacaacgagcacaaccttattgtagatctcaaatgtatgcggggcattatcccgcgcgaagagggcgcgctcggcatacgcgagggcaccgtgcgggacatcgccatcatttcacgtgtgaataagcccgtgtgctttatcatcacggattttattcgtgatgcgttcggcaggatcacggcggtgttgtcgcgccgaaaagcacaggagcgctgcatggcagagtacatagcagggcttacctgcggtgatgtgatcccggtgcgcatcacgcatttggagccgttcggtgcgtttgcggatatcggctgcggtattgtttccctactgcccatcgatgccatttctgtttcgcgtatcgaccatccgaaggagcggttcacggtcggcatggatattcgcgccgtggtgcgcatgaaggacgagaaccgcatcacgctcagccaccgcgagctgctcggcacgtggacggaaaacgcggagcgctttcgtgtcggcgaaacggtcgcaggtatcgtgcgcagcgtggaaagctacggcatttttgtggaactgaccccaaaccttgcaggacttgccgagctgaaagaaaacgtccatgccggacagcaggccagcgtgttcatcaaaagtattctgccgaaccgcatgaaggtgaagctcgtgcttgtggaatgctttgattacacctataaacccgagccgcctgtatatttctttcagggcgaccatattgataagttcacgtattctccgcccgagtgcgcaaagcacattgagacggtgtttgcgtgatttaggacagcaaaaggcggtctgcacggatattttctacccggcagaccgcctttctatgtgcctttaaaggacatttgccttaacgggtgtgattactttgcttcgctttcgctcgacttttcgtcgccgctcttctttgccttgtcttcaatgacgtacttaccgtctttgaagtcgcagacatacgagcctcccgctttcatgttgccctcgagcatctcttcggaaatcgggtcttccatcttgctgcggatcgctctgcgcagcggtcttgcaccgtaaaccgggtcaaaaccggcgtttgcaacagcttccacagcagccggggtgaactcgaccgcgatgtccatgtcgcgcagctgacccttaagaccctcgagcattttgccggcgattttctgaatgtcgtcgtgcaggagcttacggaacacaataatgtcatcgacacggttgatgaattccggacggaacaccttcttcagctcacccatgacgagctcttttgtgcgctcgaaatcggcgactgcgctgtcttcttctgtcgacttgttgtccgcagtagcaaagccgagacgctcttgctgcttctctgtaatgagacgcgcgccgatgttggaggtcatgatgatgatggtgttcttaaagctgaccaccttgccctgcgaatccgtcagacggccgtcatcgagaatttgcagcagcatgttgaagacatccgggtgtgccttttcaatctcatcaaacagcacaacggaatacggcttgcggcgcactgcctcggtcagctgaccgccctcatcaaagcctacatatcccggaggcgaaccgacgagacgagacaccgtgtgcttctccatgtactccgacatatcgagacggatcatggccttttcgtcaccgaacatggcctccgcaagcgccttgcacagctcggtcttgcctacgccggtcgggccgaggaaaatgaacgagccgatggggcgattcttatctttcaggccgactctgccgcggcggatggcctttgcaatggccgtgacggcttcgtcctgaccgatgacacgcttgtgcagcgtatcttcaagatgcagcaggcgctcgctttcttcctgcgtcagctgtacgaccgggatgccggtccacatagcgacgatctcggcgatgtcttctgccttcacgacgctgttgctgcgctcattctttgcagcccagtcgttctttttctgctccagctcatctgtaagggctttctgcttgtcacgcaactcggccgcgcgctcgaagtcctgctcgttgacggcagccgccttatcaatctcgacttccttgatgcgcttttccatctcctgcaggtcttccggcgcagtgaatgttctgaggcgcacacgggacgccgcttcatcgacgaggtcgatggccttatccggcaggtaacggtctgcaatgtagcgcgaggagagcttaacggcgctctcaatggcttcatcggtaatctgtactttatggtgcgcctcgtagcgatctttcagaccttcaaggatttgcaccgcttcttcttcggtcggctcaccgacatgtaccggctggaaacgacgctccaacgcggcgtctttttcaatgtactttctgtactcgttgatggtcgtcgcaccgatgacctggaagtcaccgcgcgccagagccggctttaagatattggcggcatcggcagagccctctgcggagcctgcaccaatgatggtgtgcagctcatcgatgaacaaaatgacgttgccgtccttcttcacttcgtcgatggcggacttgatacgctcttcaaaatcgccacggtacttagagcctgcgaccataccggtaagatcaagagccaccagacgcttgcctttcagcagctccggcacctcgccttcatgaatcttcagcgccaagccttccgcaacggcggtcttgccgacgcccggttcaccgatgagcaccggattattcttcgtacgacgagacaagatctgaatgacacgttcaatctcgttatgacggccgatgaccgggtcaatcttgccttcggctgcgagctttgtcaggtcgcggccaaacttttcaagtgcactgccgccttccttttcgccgttttcgtccttcgggtacgcgttgccggaagctttatcgacggtataaccgtcggaaagcgccgaggacaacgcatttgcaacgctctgcgggtcaacgccgagcatttgcaggaaacgcaccgcaaagctttcaccgtcttcaatgatggcgatgagcaggtgctccgtgccgacgtagttactgccgagcttggaggccgcgagctttgccatctgcaaaatgcgctttgtgcgcggggtgaaatatgcggtggtgaggttcgtcggcgaagaagtgccaatcttctcctgcatcaggcgttcgtaatcgtctgccgtgatgccgagcttattcagcacgttgaacgcaacgccgctgccctctgcaatcaagccgtagagcacgtgctcactgccgatgtaattgtggccaagttcctccgccttttcgatggcgcggttcatggcattgtttgctttctctgtaaaacctgtgaatctatacatataaattcccgtcctttcgatcactgccgtatcgcagttctctttactgattttctattattgaagcgctttgagggctttgcgcacctcgtctgcgcggagaatgtctctttgccccgccgaaaggttgctgccgtgtgcggctgtcatggtggccggctgtaccgctacggtcagtgtgtgaatatcttcaagcgttataccgcttaaaagcttttctgcaatgccgaaacgcacattggagataagcttcatatattcatcgcaggaaagcaaccgtgcgtttttcagcacgccggcggagcggcctactttgtcctgcacattgatgttcttgctgagcgaagcacgcgttttgcgctcttcggaaatgagctgcatcgtaatgttctgcaagttttccacagcctctttttcgctgagacccagtgtaatctggtttgaaagctgatacatggcgccgatgacattgctgccttctccgtatgtaccgcggatcacaaggccgagcttcgaaagattcgtggagattctggacattgcgccgttttcggtgagcgccggcagatgcagcatcacggaggcccgcatgccggtgccgaggttcgtcgggcactgggtgaggtagccgagctcggaatcaaacgcaaaacgcagcgattcgtttaaaagcgtatcgatgcggtctgccatttcggcagcttcgctgagcgcaaggccctcatgcagcacttgaatacgcacgtggtcttcttcgttcaccataatagagatgcgctcgtcctttgagatgaggaatccgcgtccctttgcgtttgcgatgaactccgggctgacgatgtggcgttccacaagtgacaccgcctgctcgttgctgaggtcatccatctgcacgaagtcgaaatccgatgcgatggcgctgttgccgctgaggatcgcatcgcgtacgcggcgctctacggctgctttctggtcaggcgtcatgcggtttgggaacggcatatctgcaaggtttctcgccagacgcacacgcgtgctgatgacaacgtcactttctttacctgctttttcataccatttcttttcttcgttaagcatggttcccatctcctttctccagttctttgatttcgtcacgcagctcagctgcatgctcgaagtcctgcttttcgattgcttctttcagttccgcacgtttcttttcaatcggcgtgggttcttccacaacggcaatcttacctgccggttccacaatgcgcagcgcattgcttccgggtactttgcccttgtgctttgctgcaccgtggatgcggtggatagtcggcatcaggcggtcacggaacacattgtaacactctgcgcagccgatcttgccgctttctgcaatctcctcaaaggaagcaccgcatttcgggcagcgcatcgcattactgcgcccggtcggcgcaccgatgaagctaccgagcagattgttgaaatcaaagtccatatcatcaaagttaaaaaagctcttgtagccttttgcccttgcacattccgagcaaaggtcatattccgccaacttgccgttgacgatggttttaatgtgggtcgttgccggattctttccgcagttctgacacatcataagtcatcccgtcctttcaaaatggctttttatacatttagtacgagcaacatgtttttgaagatcgatgcccgcagttgatctcgaatttcttttggcgccggtgcaagtgccgaatccgaaagtcctgccatcatcaggtgagcgtcggattcggacgcaacgcccgtttccacaagattccgcagcatggcgcgcatagaagctgcgtccagcttaggcccgatggaattgacaatgtgcatgattaaatcggattttgtcatgctccggcgaatgatgcgaatgtaaccgccgccgcctcgcctgctctctacgatatatccctgctccggtgtgaaacgggacgtgatgacgtagttgatttggctcggtacgcagcccagcgtgtttgcaagctcattacgctggatctccgcgatgccgttttcatcattgagcatttgtaagatgtaattcgcaacgctgtcgctgattcgcatttctgatcgcctcttgtcctttctttgtctttgactttctttgactttaattataagcaaaacgcatgtattgtcaagcgtgattttagacgattttcagaaattacattaaataatctctctatttcaaattatttctcaataatactaactgaaacgcctaaatttaaaaagtttttaaagttttgctttgaccatcacacatttcccccactttcatattctgtactgtaaacgaaaggaggcgttcaatcatgtgtaacggttttggcggaggttgctcttggatcattattatcatactgatcctcttgtgctgcggcggctgtggctgcggtaacgattgcggctgcaacaactgtggtggctgcaacaacggctgcggcggctgtggctgctgatcggtcgatcgcataatataaaagcaagccgactgagtgaaagcagtcggcttgccgttttataaataatgtgtaaagtgataaaactttacacattgccgagcatataaagaaaagctgtgcactccattagaatgcacagcttaattttaggactatgaaaagtaatttagctttacagacagctcgggactttgtaaccgtatgtattcttcttatagttgccgttagagggcgatgcctcggcgtagttgccgtaggagaatactttagcttctgcaaggcgtctgtaatacaggccgatgtagcagttgccgcctgccacatgccaatccagcagattgctgccgaatgtgtaggcgtccacatagttcaggtcatgcgtgagaccggaggtgctgttgaaagcaacatcgcctgcgcgcacccaaccgctcttgccgcttgcagagaccttgtaccagctctgcttcgtgcttgagtcgcggtaataatcgaggatgttcacacttgcgttgatcttaagcgtagtaatctgcgtggaagaagcgctgtggtcctgatacatgggcagtgtggaagccgttaccttaccgccgtacggattggaagaagacagatcctgcggcggaacaacggcgttcatgatgactgtacgcacgtagcagttgccggagccgttccagtagcctgcgccgacattgtaagagaagcttgcaagcgcatcaaactggcactggctcatcaaaaggccgttgctcgagatgaaacggttgatctctgtggtgtaagagccgcggttgacggtatcggccagcatggcctttgcttccgagcgggtcaggttattgtagaatgtggtgttcttggaaacaacgtaaccgtagccgacggtcgggatattgccggcaagcgtgtccggcgaaacctgtgggacatagccttcataagaggcgatgttgtcgagcatactgtcacttacgcggcggctctcgcctgttgtcgtatcggaatccgttgtagagacgacgaggatggtgaactctctgtaatcggaggaataaccgccgccggaagacgaatacgcacgcaccgtgtaggtgccaggtgtactgattatagccgaagcagagaaaatacggacgttgttgtcgccctgactttcggaatcgtaggacgtggtatcgtaggtgccgacgccatcaatctcaaagcgcacggcggatttctgcgtatccgtaaccgccttcaaattgaaggatgcaccggctgtgataatattcggtgttgtgtacgcaaagcggacagcttccggcgcggagaccgtgacggaaacggtggcaagtgcagtgccgtttgcgctctttgcggtgatcttggctgtgcccggcgcagcgccgtaaatgaagagctgaccggaaacaccggcttttgccgttgcaacggaagcatcactgctctcccacgtgacagagccggaagcagaagcctgaatgtagattgttttatactgtgcgagatcgacggaagaaacggagaccgatgcgctggacgaagacgggtcatatgctgtgacatattctgccgagacatagccctctgcgccgccggtcgtacgcacatgtacccagccgctcgttttgcggtcaagcacgttcagcacggtgccggtgctcaaaacggtgagtactttacagctcgtgttcggctcggaacgcaggttgaggccgaccgtaacgcggacgtattcgtctgttgcgggtgcattggagttattgccgttattggtgttatcatctccactgttaccgggctttacggagttgatatcgccggaggtgatcttcaagtactgcgcggcaaggtagccctctgtgccgtcggaaagcttcactttgtaccagctgctgtttgtggcttccgtaacggtaacggtaacgttcatatcgataaccttgatgatgccatagcttgtgccggggcctttgcgcacatttaaatcggatgtggtcttggcctgtacggttccgttgctcggcgccggggtcggcgtgggcgttgcggaaggcttggcagaattaatatcgccggaagtaactttcagatattcggagaacagatagccctctgtgccgtccgaaagctttaccttgtaccactggctgttcgacgcgtccgtgaccgtaacggtggtgccggtgccgatgaccttgatgacgccgtaattcgtacctgcaccgcggcgcaggtttacgtctgcggtgagcttagcctgcacagtgccatcattggacggtgcctgcgtaggtgtaggcgttgcggacgacgtgccggtgaccttcaaatactgtgcaaagatgtagcccgtggagccgtttgcaaggcgcacggcataccactgagagttgctcctatctgtgaccgtgacggttgtgccggaagcgataacgcctttagagctgtaattcgtgccgggaccggaacggaagtttacgtattccgtcgttttcgcgctttgctcggaaccgctcggtgcctgtgtcggtgcgggcgttgccgttgcggaggaagaactgttcagcttcaagtattgcgcaaatatgtagcccgtagagccgtttgcaaggcgcacggcgtaccactcggaattgctcctatctgtgaccgtaacggtggtgcccaatgcaatgacgcctttagaactgtaattcgtaccggggccggaacggaagtttacgtattcggtcgtttttgcggtctgctcggagccgctcggtgcgggcgttgccgtcgcggaggaagaactgttcagcttcaagtattgcgcaaatatgtagcccgtagagccgttagaaagacgcacggcgtaccactcggaattgctcgtgtcggtgaccgtaacggtggtgcctaatgcaatgacgcctttagagttgtaattcgtaccggggccggagcggaaatttacgtattccgtcgttttcgcgctttgctcggaaccgttggatggcgcctgtgtaggtgctgccgtagcagacggcgtattgttgcccgtgaagctgatgtattcggcaaaaatatagcctgtagagccgttagaaagacgcacggcgtaccactgggcgttgctcgtgtcggtgaccgtaacggtggtgcctaatgcaatgacgcctttagagctgtaatttgtgcccggtccggagcgaaaattcacatattccgtcgttttggcactgcgttcttccccattgcttgtgttgccgccggtagacatggaaatatactcggcgtagatataacctgtagagccgttagaaagacgcacggcgtaccactcggaattgctcgtatccgttaccgtgatggtcgtgccggaagcgatgatcccctgcgagctgtaattcgtaccggggccagagcggaagttcacgtattcggtcgtttttgcggaaacttcttccgcataggccgcaagcggcagcgcagaagccaatagcagcgcggaaagcaacagagccgtacccttctttcggagcattctttttctgtattgcatgtgttttcacctgtccttatcaaggcatcgacctgtagaagcaaaagccggttcctgtcctgttgcggcagaatatggtacagatcgttttatacagttacaatcataacacaatagttacaaatttgcaactatttttgtggttcaaaagccaaaaacagaaaataaacccgcgattttcacttaaaatttgaatatgaaaaataccggacccgtaaaaacggatccggtatcgaatttcaggtgaaattacagcttttcaacgatggctttcgtatcgcgtgcaatgacaagttcttcgttggtcgggacgatgtaaacagcgaccttgctgtccggcgcggagatcttcttctccttgccgcgaacgcccttgttggcttcgtgatcgaacttgatgccgaggtattccatgttggtgcagatgcgctcgcgcagggtatcctggttctcgccaagacctgcggtgaagacgattgcgtctacgccgttcagcgcagcgacatagctgccgatgaacttctgaatctgataaacgagcatctcatgtgcgaggtgtgcacgctcgtcgccctcgtcctctgccttgcagatgtcgcggtcatcgctggaaatgccggagataccgagcaggccggacttcttgttgaagaggtcggaaagctgtgccggggtgaggttttctttctctgcgatgaacgtgacaacggacggatcaagcgtgccggtacgggtacccatcatgaagccgtcaagcggagtgaggcccatgctggtgtcgatgaccttgccgttcttgatggcggtgatggaggaaccgttgccgatgtggcaggtgataagcttcagatccttgatgtccttgcccatgagctctgcaacgcggtggctgacatagcggtgggaggtgccgtggaagccatagcggcggatcttgtacttctcatagtactcatacggcacagcgaacatgtaagccttctgcggcatggtggaatggaaagccgtatcgaacacgacaacttccgggacttccttgccgaaaacgctcatgcaggcacgaatgccctgcacatgtgcgctgttgtgcagcggtgcaagcgggatgaggctttcgatgccctcaatgaccttttcgtcaacgagaacggactcgctgaagagcgcgccgccctgaacgatacggtggccgatagcagcgacttcgctcagatccttaatgacgccgacttcactgtcgagaagtgcgttcttgacctgctcgaacgcttcggtgtggttcgccatgcggatttcgatcttcttctctctgccgtctgccgtcttgtggccgaaaatgcccatttcaaggccaatcttctcgcagttgccctttgcaagcatttgctcgttgtccatatcgatcagctgatacttaagtgaggagctgccggcgttgatgaccagaattttcatttcgtcttccccctgaatcatggttaaatttgaattggatcatctgtgcaaacgcacaaaaaataagcacgacacttccaaaattataaataaggaaacgcggcttgtaaattgatcttcattgctttatacttatgataatacaaaatcatgtaaatttcaaggagtttcctataaaatgattggaaaaaacaagatttcgggcgttgtttgcgagtttaatccgctgcataacggccacgcggcactgctctcccgcatttcggaggagttcggcagcgacactgtctgtgtgatgagcggaaattttgtgcagcgcggcgaggcggctgtgctcgataaatggtcgcgcacacggctggcactgcaaaacggcgcggcactcgtgatggagctgcccttgccgtgggctgtggcaggcgcagaaaaatttgcactcggcggcatttcgttattaaatgcgctcggttgcgtagatacactgacgtttggcagcgaaaccggcgataccgctcccctcatgcactgcgcggaatacttgcactccgatgtgtttaattcggatattcgcccggaggttgcaaaaggcgtttcgtttgcagcggcgcgtacggaggctgtgaaaaaggcactcggcgcagaaaccgcagagctgctcacaaagccaaattgcattttgggtatagagtattgcaaggcgatcttatcgttgaattctaatatcgtgccgcagactgtgcagcgtatcgcgattgaccacgacagcgacaaagcgcacggcgcgtttgcatcggcgagcctgattcgcagcaagagcgccgagggtgaagagatttcctcgtatgtcccggaaaatacggcggtgtgtattcgtgcgctgcaaaaggaaaagcagtaccccgcttccctttcgtatctcgaccgtgcggtactggcggcggtctctgccatgtcgcccgaagacctgcgccgcgtgccggatgtttcagagggcattgaaaaccgcattttggcggctgccgaaacggcggaaacgtgcacagggctgtttgatgcggtgaaaaccaagcggtacagtcacgcgcgtattcggcgtattgttttaagcgcgtatttgggcatcacgaacgatctgcccaatttgcctccgtacctgcgcgttttaggtatgacaagctgtggtgcggagatcctgcacaaagcgaagccgatgttgccaatcatcgcacgacctgcggacgtgaagaagctttcgccggaggccagaagtgtgtttgagttggaagtgcgcgcggataatctttacagcctgtgcacagagcatcgccgccctgcgaacatggattatacagaaaaactgattcggatataaactgagctctgcatttggcttttgccggtcgcagagctcttcttttatacaaaaagaccgaaccacgcgggctcggccttttgaattttcaaatattcgaattacttctcaagcggtgtgacttccacagtccaaccgagggtatcttctaccttaccggtctggatgccggtgacggtgtcgtacagcttctggctgaattcgccgatgccgccgtccttgatctgcatgacttcgttctcgtaacggagtgcgccgaccggggagataacggctgcggtaccgctaccccagcactcttcaagtgcaccggtacgggccgcctcaacgagctcgtcaacggagattcttctctcttcgaccgggagaccccagtgcttgcagagatcgatgcaggatgcacgggtaacgcccggcaaaatactgccgttcagcatcggggtgacaacggtgccgttgattttgaagaagatgttcatagcaccgacttcttcgatgtacttgcgctcaacaccgtcgagccacagaacctgagagtaaccttcgtcgtgtgcctttacctgtgccgcgaggcttgcaacgtagttgccgccggtctttgcttcgccgatgccgccgcggactgcacgtacatagtcgtcttcgatccaaatctttaccgggtcgagaccgctctcatagtaagcgccgaccggggaaagaatgatgatgaatttataggtattcgacgggcgtacgccgaggaacggatccgttgcaatgacgaacggacgaatataaagagaagtgccgggacggctcggaatccaatctgcgtcaacggcgacgagcgtcttgatcgcattgaggaaatcatcggccgggatctccgggatgcaaagtcttctgttggagttgtttgcacgctcgatgttcttgttcgggcggaacagacggatgcggccgtctgcgcatttataagccttcatgccttcgaacatttcctgaccgtagtggaaaaccatagcggacggatcaaggacgatcggctgatacggcatgatcttcggatcgtgccaaccctgctccgggttatattccatcacatacatgtgatctgtaaagattttaccgaaaccgagcttgctttcgtctgccggcttcgctttaggcgcagtggtacgctcaatctggattttctgcatcaaaaaacacttctttcctgtttgcttatacacattttagcacgtatttgccttttttgcaagttaccgaggtttaaattgcaaaaaaagcttcacaaataaccgtttggctttgcgaagctttctgttctttttgtataaacgaatgcacctttacaggtgtgtgcgcagcccctttgggtaacgattcttcaaaacaccgttcgatgccttgccaaagcccgttacaataccgtctgcggcgacgacggtgtaaccggaaagcccctctgcggggatttcttcgccgcgcaaaaacgcgaataaagcaggatcgttcgatgtgagatgcagcacgctgcggcagttttccgcacggcttgccatgaaaatgccatgcgcgggctcgatgcggttcttttttgcctcgccgaattccacaccggcgcgcagaacggaaagtcctgcaatgtccggcagctcatttggcaataagatcacacggtcgcgcacgcgctggaatctgcccggtgcatcggtaaacagagatgtgtacaatttttcggcatgcgcctgcgtctctcggtcgggtttaaagctaaacggcgcaaaatgtttttcacatggcgcaacgcggcggaagcgcgcggcaaagtgcccctcacccccgtccatcgggaaaatgcgcacagcgtctacgccataggccgggcgaccaaatgtgacattcggcttttcgagcacgaattccgggtggctttcgagaaatttctgcacaacgccctcattttcttccgtggaaaacgtgcaggtagagtacaccaaaatgccgccttcgcgcacgcactgtgcggcggaggataaaattgcgagctgacgtacagcgcaggtctccacgtgctcaggactccattcctgcacggcaacgggatcgcggcggaacatgccttcgccggagcacggcgcatcaacgagcactttatcaaaatacccgccgagcttttccgcaagcatctccgggtatacgctggaaacgactgtattacgcacgcccatgcgctccaaattggaggataaaattgcggcgcgattgcgcacaacttcgtttgaccacaaaagcccggtgtcgccggtcagcgcggcaatctgcgtggatttaccgcccggtgcggcgcagaggtcgagcaccttatcccccggctccggcgccaaaagcgtgacggccgaagacgcggacggctcctgcgaataaaacgcgcctgcatgatagagcggcagcgccgccattttggtatctgtcggcgcataaaacgagagcggcgaaaacggcgtttgcaccagtgtaaacggcagtgcgcgttcaagctgctcttttgtgcattttacagtgttcaaacgaatgccgcgtttgtgcggttcgttgtaagacgcccgaaacgccgtatattctgccccaagcatatcctgcattcgtttttcaaaagctgcgggcaattccatggccgccccacctttcctaatttcataaattcagtacataaacgcgcgtaccgtgcgcataatagctttcggaaggggtgaatcacatggcaaattccgaaaacaagaattacacaaacaaaaaccagaaacaaagccgcaataagagcgaccgtcagacaaccgaccgcgtgaataacggcacggaaaatcgtacggaaaaccgcagtgaaaaaagctgccggtaacacaaaaaaccggaaaaagcaggcaggcgatgcgcttgtctgctttttctatgcggatttattctttcggctcgccgaccggcttatcgcccgtcttgcgaatagctttgataatctcgccgagcgtgcggtcgtcggagcgcacgggtttgaagccctcaccggcgatttcaccggcatcgccgacgatgacgaacgcatcggggtcttcctcgcggatgatctcactgatgcggaacacctcaaagcgacgcacggcgcagaagagcacctcgccgtcctgtttcaaatagccgccgcgggacttgagaaacgtcaggccgcggtccatctccttgatgatgcggtcggcaatgacatcgtttttacgggacataatgaagaacattttgccgttgcccgcatctgtgccgtacagaattgtatcgatgatttttgtcgatacaaaaatgacgatgcacgcgtacacggcgctttcgatgctcttatatacgatggcggaaaacagcacgacgcagccgtctacggcaagcatcagcttgcccatggaaagatggcgcaggcgatgattgagcagacgcgcgatcatgtccgtgccgccggtcgtggcaccgcgcataaagacgagtgaaagacccacaccctcacacacgccgccgatgagtgtgatgatgagtgggtcaccgtggtagaccggcatgaacagcgccacgatgtcgatgcaggcagcgtttaacacgaccgccaacatcgttttggtgacgagcttatagccgatctcaatgatcgcccaaatgatgatcggcacgttaataagcaaaatcacggtgccgacgggcgtgccgaacagataattcagcacgatggcgataccgctcacgccgcccggcgcgatgttgttcggcgcggtaaagccgttcaggccgaccgcgtaaataacggaacccgccgtcatgaaaatcaggtcaagcaggaattccttcacgttttttgcaactttatttttgcgcatgtgcggtttcctccgtttctgcaaattcaaggatcttatcgaagaaaagacgcaggcgctccagctcgcctttaaggtaaagatagccgaaaacgcattcaaatgctgtggctgcgtggtaatccgcaacgcttgagtttttcggcacgtgcgaaacgtgcgcattgcgtccgcgcaggcagacttctttttcctcttccgtgaaaagcggcatcagcacttcactaagcaccttcgcctgaaactcgcaacgcacgaacgaaacggcgcggctgtgcagctttttcacggggcagttgcctttggagacgatatattcgcgcacgaaaagctcgtacacgccgtcacccacataagcgagcgttaaggggcttaactgcttcggatccgattccgtttgatagaacttttccaaatagccaccctcttagtttacaaaatcaaattcaaggtcatacatgctgaccgtgtcgccttcctggatgcccgcctcacgcagcgcatcgataacgccggtgtgaatgagcacacgctggaagtactggagcgactcgtaatcatcgaaatcgacggcggagatgagctttaagagccaatcggcctcgacaaaatacacgttgtcctccacgcggatatcgacctttgccttgctgctgaattcttcgacaggctttaccggctccggttccggctcgaaatgcgcgaccggcggcagcgtggaaagcatttctgcagttttattcaaaagcgggtcaacatcatagcggattgccgccatgattggaaagaattcatagccttgctcctcgacaaacttgcggaaatcctctacctgctcgtcggtcgtcaggtcgcatttgttgccggcgaccagcatgggacggttcgcgaggtcggggttgaacttgcgcagttcctcgttgatgatgcggaagtcctccttcgggtctctgccctcgctgccggaaacatcgacaatgtgaatgagcatgcggcaacgctctacatggcgcagaaactgatgaccgaggcctacaccctgccatgcgccctcgataaggccgggaatatccgccatgacaaacgatggcgcgttcggcatatgcaccacgccgagcaccggggtgatggtcgtaaagtggtagtttgcaatgttcggtttcgcttcacttacaacggaaacaagcgtagatttacctacatttgggaagcctacaaggcccacatcggcgagcagcttgagttcaagctgaagctcgaatgcttcaccgggtgtgccgggctttgcaaagcgcggagtctggcgcgtaggcgacgcaaaatgcgtgttgccccagccaccgcggccgcccttcgcgataacgacgtcttcgtctgtggacatgtccgccatgatgcggccggtttccgcgttgcggatcagtgtgccgcgcggcacggtaatgacgagcggctgtgcgcttttaccgaagcagcgcttgccgcgaccgttttcgccacgctctgcggtgtacttgcgcttgtagcggaaatccgccagcgtggagaggttatcgtccacgcggaacacgatgtcgccgccgcgaccgccgtcgccgccgtccgggccgccggaagccacgtatttttcacggtgaaaagccacggcgccgtcgccgccgtcaccggcttttaccttgatcttagctatatcgataaacataattcatcatcctttcagcgccgcggacggctctgtacaaaataaaatgggcttctccgctttacccgaagaagcccgtttcatcgtatattcggggatacgaaaccggtattcccccaagggtcaaaattactgctcgatcgagtaaacgctgaccttcttgcggtcacggcccatacgctcgaaacgaacctgaccgtcaatgagcgcgaacagagagtcatcagagcctctgcctacgttctcacccggatggatgtgcgtgccgcgctgcttaacaagaatgttgcctgcgaggacgtgctgaccatctgcacgcttgacaccgagtcttttggattcggaatcacggccgttcttcgtggagcccataccttttttatgagcaaacaactggatattgatcttaagcattttgttgccttcctttcgttttattgtcagacttctgcgtagcgtacctgtaagttttcggggtactgctcctctaaaccgagaagatgcagcttaaatccctcaaacaggctacggcatgtccgtgcatcggtatcggaaaccctaaacagcatctcgccgtcctctgctcggagagaaatcggtgtgatgtgtaaaatctccagcgcggtgttcgccgtcatatacgccgcagaagaaaccgcagcacagagaatgtcttctccctcctgcgccagaccggaatggccaagcacggaaaaaccgagaagcgctccgtctgcatttgcgaaaaaatccgcacgaatcatacgatcaaattagccctgaacggactcaatctgaatcttcgtgtagggctgtctgtggcccatcttgcgcttttcgcccttcttcggcttgtaagtgaggatcgtaaccttcttagccttgccgttcttcaggaccttgcctgtaacggaagcgccctcaacatacggggtgccgatttttgttccgtcttcgccgcaaattgcaacgaccgggaacgtaactgtctcgtcttcattggcagcgagcttctcaacgtagatcacgtcgccgtactgtaccttgtactgcttaccgccggtttcaataactgcaaacattttttctgcctgccttttctgtaatctcgctactcgtaggcggactttcgtcacttttcagcccacagtaagcggctctatcatattaacatacactgaccctaaagtcaaggtatttcaaaggggttttgtggttttttcttcaagcagcaacgcaagcttgtcgtcctgctttaccgctttgatgacgctcttgcggtctgcgatgcgcacgatcaaagcgaggagaaaattcaaaaaggtcaggaacgccagaaacaggcggtcacggcgcttttggcgcttcagtttctccgggtcgcgacggcctgcaccgttacgctgtgccttattcatggctcttatacgcttgttcacagtacaggcaacgatagcggtgcgctttttcatcgcacagcacgaagatctggtcgaggttttcctccgtgcttgtgatgcagcgcgggtttttgcactttacaacatttttgatgcgacgtggcagcacgatgttctctttcttcacaagctcaccgtttttaatggtgcatacggtgatgttgttatcgataaagccgagcacatcgaagttgatggcgaggtcgccttcaatcttgatgatatcttttctgcccagcttgctgctgcgggcatttttgataagtgccacgcagcaatcgagcttatcaagctccaaaagctcgtagatgcgcatacccttgcctgcttgaatatggtcgatcacaatgccgttttggatactgtcgatgttcagcatacggtttcctcctcaaaaagtcccggttcgatgttcagaagcattaaaatgagcgccatgcggacatatacgctgttttgtgcctgcacaaagtactttgcgcgcgggtcatcgtccacttcgaccgcgatctcgttgatacgcggcagcggatgcagcacaatgagatccttcggcgcaagcttcatcttctctgcatcgaggatgaagctgtcttttaagcggatgtaatcttcttcgttgaagaagcgctcgcgctgtacgcgggtcatgtagagtacgtcaagctccggcagaacttcgtccatggtacggacttctttatattcgcagccggagggctttacgacttcatcaatgatatagctcggcacatgcagctcttccggggagatgaacacgaagcggatgccctcccagcgcacaagcgacttgatgagcgagtgcacggtgcggccaaatttcaagtcgccgcacagaccgatcgtcaggttattcagtctgcccttttcgcggcggatggtgagcaggtcgctgagcgtctgcgtcggatgctggtggccgccgtcaccggcgttgatgaccggcacacgggcgtactgcgctgctacgcgcggcgcaccctctttgttgtggcgcatggcgatgatatccgaatagcaggataccatgcgtaccgtatcggcaacgctttcacccttggaagcagagctgttctgtgcacttgcaaagcccaataccttgccgccaaggcgcatcatggccgattcaaagctcagacgcgtgcgggtactcggctcgtaaaagagcgtggcaaggatcttaccttcacacttgtgggcgaatgcggtgcggtcgtttgcaatgctgtccgcaaggtccagcagacgcagggtctcctcaaaggaaagatccagcgggtctacgaggtgtcttaactcattcatcttatctatgccttcctttcttatgtgcgccgtgtgttgtgttttatacgtggcgcaagtaaaaacaggctgtaaaaaacctccccggtaagcccagagaggttttcagcatcaatcttcgtcttcttcctcgggctcgttccagttgtgccagacttgctggacatcgtcgttatcctcgagtgcatcaatcagcttctgcatcttgagaatctgatcgggatcggtgagatccgtgtaggtatccgggaccatttccacttctgcggaaacaaaggaatagcccttagcttccagatcatcgcgaacgccactgaaatcggacggctcagtgtagatctcgaatacgtcttcgtctgcctgaaaatcggaagcaccggcctccagtgcatcgctcatgacggtatcttcgtcaaggccctcacgctccagcacgataactcccttttcgttgaacatgaaggaaacgcaaccggtggtgccgaggttgccgccgaacttatcaaagtaatgacggacatcgcctgcggtacggttgcggttatcggtgaggcattccacgatgacggcaacgcctgcggggccgtagccttcgtaggtgatgctttcatatgcgttggagttgccctcgcctgcggctttcttaatgatgcgctcaatgttgtcgttcggcacattgttcgccttagccttcgcaatgacgtccttcagcttggagtttgctgccgggtctgcgctgccgccttctttaacggcaacggcaagctcacggccgatctttgtgaagatcttcgctcttgcaccgtcggtcttttctttctttctcttaatattattccacttggaatgtcctgacattgatgaaaacctgcctttattcacacaaattcaagttattatatcacagctcgcgcgcgatttcaatagcaatttcctgtgccttcgcgaaaatcgcagagttttcgcaatctgcacggtctgtgtccggcaaaaccaccgtttttttgagcgttgtgttcataacggaaaagctttggcgcagtgttttctcgcatacctccaccgcaaacgggtcataccgccccatggtgagcagcaaaacagcatcgcggtgtgtcgcaatcgccgggcggataccgcgggcaaatctagcttcaaaataccgctgaaaacggtcgatgaccgccttgagctgcgccggaaacgagaggttatagaccggcgtggcgatgacaagcagatcacacgcgcgtaggtcacgatcgaattcatcgaggtcgcgaaacgcgcatccgtctgctttttggcaatatccgcaggcgatacacggatgaatattcactttgcaaatgtcaagtgatttcacttgccagtctttccctttcaatccgtcgagaaaagcttcaagcagcttttttgtgtgtccgtctttatgcggcgaagaaaacaaaacgagtgcatgtttcatgtactggcctccagttttgtaaagtgaaaagcctttgcaaagctatttaacttcacacaaatgtaaaaagagcgctgtgaattcacacacagcgctctgtaaagaatcatccctttacaacgatattgacgagcttgcccggaacgtagatctctttcacgacattcttgccgttgatctccgccgcaatgcggtcttccgcctttgcaagtgcaatcgcgtcatccttctggatatcggctgcaacgcacagtcttgcgcgaactttgccgttgacctgcacaacgatttcaatgacgtcatctttgcactttgattcgtcgtacttcggccaaggctgctccgtgaccatgccctcgccgagcttcatttcgctccaaacctcttctgttacatgcggtgcaaacgggttgaggagcatcgtgaagacggagagctctgctttattgatggagcccttttccgcaataacgttcatgagcgccatcaaagatgcaatggcggtgttgaacttgaggttctcaatgtcataagagaccttcttgatggctttgtggaaagaattttccatctccgggcggatcgcttcgccgtcgacgagaatagactgcaggttccaataacgctcaatgaagcggcggcagcccttgataccggcgttgctccacggtgcggccttctcaaagtcgccgatgaacatttcgtagagacggagcgtatctgcgccgaactcgtttacaacgtcgtccgggttgacaacgttgccgcgggacttactcatcttctcgccgttttcaccgaggatcataccgtggcttgtgcgctttgcatacggctctgcggtcgggacctggccaatatcgtagaggaacttatgccagaaacggctgtacagcaggtgcagcgtggtgtgctccatgccgccgttataccagtctacctgatgccagtagttgagcgcttccttggatgcaaaagattcatcgttgtgcggatccatatagcgcaggaagtaccaggaggagcctgcccactgcggcatggtgtccgtttcgcgcatggccttgccgccgcacttcgggcacgtggtgttgacccaatcggtcatcttggagagcggagattcgccgttatcggtcggctcgtaggaatcaacctgcggcagaacgagcggcagctcgctttcgtcgatcggcacatagccgcacttttcgcagtgtacaatcggaatcggctcgccccagtagcgctggcgtgcgaatacccagtcacggagcttatagttgaccttacggtggccgatgccggtctcctcaaggtaatctttgatgcggactttcgcttcttcgacggtcatgccgtccagaatgccggagttgaccatgatgccggtgtcgcagtccgtgaacgcttctttctgcacatcgccgcccttaacgacttcgatgattggcaggtcaaacttctttgcgaactcccagtcacgggtatcgtgtgccggaacagccatgatggcgccggtaccgtaggaaacgagaacgtagtcggaaatgaagatcggaatggtggtaccggtcagcggattgatggcctcaacaccctccaaacgcacgccggtcttatctttcgcgacctcggtgcgctcaaagtcggactttttcgcggcctctgcctgatacgcgcggacggcatccagattctgcagcttatccgcccacttttcaatgaacggatgctccggggaaacgaccatgtacgttgcgccgtaaagtgtatccgggcgggtcgtgtaaacaatcagcttatcgcctgcggtcgtgttgaaatcgacctcggcgccctcggaacggccaatccagtttttctgctgggtcttaacgcggtccgggtaatcgacaagatcaaggtcgtcgatgaggcgttgtgcgtaagcggtgatcttcagcatccactgggatttgaccttgtgaataacttcactgccgcagcgctcacagacgccgttgacaacctcttcgtttgccagaacgcatttgcaggaggtgcaccagttgacggacatctcttttttgtaggccaaaccgttcttaaagagctggaggaaaatccactgcgtccacttgtagtatttcggatcaatggtgctgatctcacggctccagtcgaaggagatgccgagagactgaatctgctgcttaaagcgcgcaatattcttctttgtgatctcttccgggtgcacgtggttcttgatggcataattctctgccggtaggccgaatgcgtcccaaccaatcggatagagcacattgtagccctccatgcggcgctttctggaaacaacgtcaagcgcggtgtacggacgcgggtggccgacatgcagaccctgaccggacgggtacgggaactcgatcagagcataatatttcggcttatccgaagtattggaagcatggaaaacaccggcttcttcccacttcttttgccacttcggttcaatttcactgggattgtacttgttcatattgattacacttacctctctgcgctatataaaataacaaaatcaattcggttcaaacgtcatgttgagcttttcgccgtcgagccacaggcgatccaaatcataaaaactgcgcgcttccgaggtgaagatgtgtacgaccaccgtttcgtaatcgagcacgacccaggaatcggagcgatagccctccacgcggtccggtgcaatgccgagctctttcagcttaaactccagctcgtccgccagagcatgcacatgcgtgctgccggtgccgttcgccagaacgaaataatcaccgagcgaggaaacgtccgaaatgcggatcacattgatctgatcggcttttttcgcatccaaaatgcccgctgcggtttttgcaagcgtcaatgaatccatgcttttagccattcctttctgcgcgctgcgcgatttttatgcttccttccgcttagttgccgtgccgcaaagcccacaccgcgtcattatatgcgtctatggtttccggcacgatgggcgcgcggtcttttgcgagctccgtaatggtgaacgcgatgccctccacaatggctttgtcaaggcttttatacgcggccttgcgcatatcctctacgccgggataattgcggtctttggagatgaaatccgcgataaaaatgactttttcgagtaacgtcatgttttttctgcccgtggtgtggtatcgcacggcgttgtaaacatcctcgtcctcaatgtgcagaacatgcttgatatacaccgcgccgctgatggcatgccagaactttttagcggaaagttcaacgtcacttataattataccaaagtccgcgagaattttcaactgtttctccgggggtgtatccttcaaaatatcgtgcaaaagccctgcaagctccgctttttcggtatcggcaccgtatttttttgcaagctttaccgcttcttccgaaacatttaaggagtgttcgaaacgtttttgcgtgagcatgggcttgatgatatcgatatattgctgtttttctttcttattcatgcgtgtaaagcctctttttttggatgtattccgcgacgcctgcgggcacaagaccgcttatatcttcgccatacagacttttttcgcgcaccatcgtcgatgagacaggcaaaaactcgatgttctgcacggtaaagcgaagctgcgggaacttttccttcacttcttccccgtgcgtgacaagcgtttggaagctatccttgtcacgcggtgcggcgcagatctctgccgcggcgaaaatgcgctccgggtgataccacttttcgacggtacagaacatgtcttcccccatcagcaaaaagagctcatcgtcgggatattgtgctttcagttccgtcatggtgtctgccgtgtagcttttgcccgtgcgcagcacttcaatatccgagactgtgacgggacattcggcaatgtctgccgccgcaagcctgcacatttcaatgcggtctgccccgcttgcaagctgatgtgtcgctttgtgcggcggcgtgcccgtcggaatcaaaatcacgcggtcaagcgacagacgcttaataaactcccgcacaaggtgcacatgcgccttgtggatgggattgaacgtgccgccgtaaatgccgatgcgcatggcttatgcctttttcgcacgcggcaggacgatcttcggatccttttcgttgcgtttataaagcgcaaatttggaaccgatgacctgcacgacttcgctttctgtctgctctgcgagcgcttctgcggcttcacgcggagagaccggcgcagtctccaacactttgcccttgatgagttcacgcttaaaaatagcgtctgcggcctgctttacgacatctccgtcgatgccgcccttgccaatcatcaaaatggtgtcttcatttacggcgagcgagcggagatacgctctttgtttactggtcagcataatttatccctctttgtctttcaggtagttttcaagtttttctgcaaaaatacgcaaggattttcctcggtggctcacggcatccttttcttctgccgtcgcttcgccgaatgtcttgcccgcgcagccttcttcggtgcagatgaaaatggggtcataaccgaaaccgctttcgccgcggcattcctctgcgatgcgcccgcagcagtagccttcggcttcaagtacgtcgccgttcgggaatacacagcagatggcacttgtaaagtgtgcgccgcgcttttcttccggcacgcccttgagcttttcgagtaccgttgccttacgcttgcccggctcggcataccgtgcggaatacacgcccggctcgccgtttaaataatcgatcgataagccggaatcgtccgcgacgcacggcaggcccgtttcgtcacacgcggatttcgccttgatatacgcgttttcacggaacgtggtgccggtctcttccgcctcggtcagctcggccgtctgcacggtgatgccaagcggcgccaaaatgcggccgaattcttctattttatgcgcattatgcgttgcaatgatcatgttcatgcgttatccctccaaaattccgaaatcgcgtgcggcttgctgccaatgctctaaaagtacggggccgcccgctgcaagctcttctgcgcgctgcacgcagaaaagcgaataatttttgccggtgtaaagctgttttaaaatcgcatgcccccacacgcccgcgcgggacagcagtccgctttcgcgaatttccaatgctgcggcgtcaatgtcatacggcacttcgagcagcgtttcgttccatgtgtttccgtcggaatcgagcagcgccattttcgccgtgacggtttgcgtacactgcacgccgaccgcaccggggttcacgtacagcttgcccattgtgtgcgcgctgcacggctgatgcgtgtgaccgcttaaaagcacgcgctcgtcgatttttaaaagccagctttctattttataggagaacgggcgcagcgtgtcgcgcgttttttccggtgagccgtggcaaatgcgtatgggacacttgccgtttgggtcaatcgtctgcataaacggcaatgcggagatgaactcgagatcctccgccgtaagcccctcgtaggtgtatagaagggagcctgttgttgtgccgtttgcccaatcgctgccgaagttgtggtggttcagcacgtattcttcacggttgccgcgcacgaaccagcagggcatttcctgctttgcgcggtatattagcttcatggtctcgtgcgggtttgcacagtccgaaatataatcgccgaggaaaatgtacccatccgctttttgcttttccgcttccttcaggcaagctttcagcgcatggtggttgctgtgtacatcggaaaaaacggcgagcctcatgcttccggtctccgctcgaacagtgcgcgggcgaaatcctccgcgtcaaacggctgcagatcgtccacctgctcgccgacgccgatgaacttcaccggcaaaccgagatcccggtggatcgccaacacaacgccgccctttgcggtgccgtcaagctttgtgagcacgatacccgtgagccctgcggcttctttgaattcacgcgcctgattgacggcgttctgccccgttgtggcatcgagcacaagcaaaacttctttgctgcagcccggcagacccttatcgatgatgcgcgaaattttggaaagctcgtccatcaggtttttcttattgtgcaggcgtccggccgtatcacagatgaccacatcggcgtgacgtgcctttgccgcggagattgtatcgtacacgacggcggcggggtctgcgccctctgcatgcttgatgatcggcacgtctgcacgctctgcccagacttcaagctgctcaatggccgccgcgcggaacgtatccgccgcgcccaaaattaccgatttgccctcttttttaaggcgggaagccagcttgccgatggtcgtcgttttgccgacgccgttcacgccgatgacaaggatgacggatggctgcgtatcgagatgcaactcgttgtcgccgctgaccatctccgtgacgacctcctgcaaaagcgtcataatctcgttcgggtctgtgatgccgcgctctttcacgcgtgcgcggagcgtatcgcagatttcggtcgcggtgttcatgccgacgtccgccatgacaagcagctcctcaagctcctcaaacagctcctcatcgatctttgtgaacgcgtggagcatgctgttaatctgcccggtgatgctgtctcttgtttttttcagtcccgctttgatcttatcaaaaaagcccattcaggcacctcttttccgaatttatgttgttatacccagtttttcctgcgcttcgtgtgcgtgcagtgccaagagtttcgaaatgccctgatcctgcattgtcacgccgtagagcatatcagcttcttccatcgtgccgcggcggtgcgtgatgacgatgaactgtgtcttttggttcatgcggcgcaggtaatttgcaaagcgcacgacatttacgtcatccagcgcagcttcaatctcgtcgagcatacagaacgacggtggattcacgcgcatgatcgcaaagtaaagcgaaattgccacaagcgccttttcgccgccggaaagcagctcgatgtgcgagacgatcttgcccggcggatgcacgcggatatcgatgccggaatgcagtacatcgccgctgtccgtaaagcaaagctctgccgagccgccgccgaacaactcctgaaaaatccggctgaaattctgattgatgacggaaaagcgctctgcaaactgcgtctgcatctgctttgtcaagttgtcgatgagctttaacagctcggcgcgggagcgctgcacgtcgtccgtttgcgttttgagaaaattgtagcgctccgaaacctctttgtattccacaacagccgccacgttgacggagccgagcgctttgatgctgtttttgagttcggacaaccgcctttgcgccgtgggcacatcttcaatcgtgatgttcatttcctcggcttcgcggcgggtgagttcgtattcttcccacagttttttgaggatagcgtcgtattcaccgctctggttttcacggcgttcgcgcagacgagcaagttcaaggccaatcgtctcacggcgcgaggaagcttcgcgttccttttggcgcaactcgctcgtctgttgctcgagtaccgtgcgctttgcggcgatggcgctgaccgtttgccgtttttcctttgcggtctcacgcagattagcagattcaatttttcggttttcaatatccgcttcgcgcgctttgatcttctcgaagctttccgcaagttcttgatttaaactttctatacgtgcagcgcgctcagattgctgtgctttcagcgtttgcacagcattttcaagcgattctttatctttttcgatggcgagccccgcaaaacggatttcctgcaaatgctgcaaggtctcatcacaacgatgcattgcgtcctcgcggtcgccgaccatggattccattttacttctggctgcctgaattttgtcctctgtttcttctgttttctgctgggcactgtctgcggtctgcacaaaaccgctcagacgctttgcggcactttctttttcgtcgcgcagagaagcaaggttcgcggtttccgtctccacgtcgcgtgcggcacgggccgcttccgttttgaagcggatctcatcttccctgtgctgcgccagcacggccttagcgttttcaagctccgccatggcctgcagcacttcctgctgtgtagccttgtggcgctccagtgtttcatttgcagcctgcgccagcatttgtgcgtctgcgcgaatgcgttcgatttccgcagaacggctcaaaaggccggagttgcgcgccgcggaaccgccggtgaacgaaccgcccgcattgacaatctgcccgtccaagctgacgacacggtagcggaaccgaatgcgccgtgcaatctccgccgcgcgatcaaggtcttctgcaacaacagtgcggccgagcagagaatcgcggatgccggcgtactgctcatcacagtggcagagtgttgaagccacgcccacaaagccgggcatattctgcacatcgcgcgcatcgataaccgtaccgcgcaccgtggtcagcggcaggaatgtcgcacggccggaatcgcgctgtttcaataagcgaatagccgctttcgccgcatcttcggaatcaacgacgacgttctgcatggcggcgccgagcgcggtctccagcgccacggcgtattcgcgcgggacttttaaaagccgtgtaacaggtccgtggataccacgcagattgccgcgcgtgctctcgcgcatgacggttttaacgctctgcgtgaagccttcaagattgcgttcaaggtcttccaacagtccagcgcggcgctctttttctttggcgtcgagcatctggcggtcggcttcggctttcacggcttcggcgcgttttctgcgctgttgcacacgcatttcatgcccctgcacagtgttttcagcgttttgaatgtactccgccgtatcgtgcagcatggcgtcaagctcctcgcactccgtgtgaagcgctgcaaggcgttcttcgctttcggtgatcgtagtatccactgtttcggcgcgggcgcgaatctcctgcatggaggattccgccgaggactgctgcacgcgcatttcggaaagtgcggcgttcagtgccacaagctcagccgaaacggcgtcgatctcacgcgtggtgctgtccgtgccggcacgcagctcctcgagttgtgcggtaaaggcaacgaaatcggcatggttctgcgcagcttccgcttcctttgcttttaccgcctgttctttttcttgaatatccgcttcaagcgtttgtccggtcagcgcggcgctttcaatctcgccatttaatctgcggatggtctgctgctcgtgcagaatatcattttcaagcaccgaaacttctccctctttacgggtggcgagttcatcggcttcggaagccttcaaacgtgcttcttccatctgtgcggtgcagccgttcgtttccgtgaaattctgctcgatttgcgcggaaagcacattgagctcactttcggcttcctcgtagctgttctgcgtggaggcaatcttttcctccacctcgcgcacgatcttgccggagcactccagcgtttcaagccacaagccgatctccagttcctttttctcgctgtcgagtgcaataaacttttcggctttctccgcctgctcgcgtaaagggcccacgcgttcttcgagttcgtttaaaatatcgtgcaggcgaatgaggttttcttcggctttttccaagcggcgttcggcttcctctttgcggtagcgaaagcgcgaaatgccggcggcttcttcaaaaatctcgcgtcggtcttcgctttttgcggagacgatgctatcgatcttgccctgtccgatgatggaatagccgtcgcggccgaggccggtatccatgaacagctcatgcacgtcgcgcagacgtacgagcgttttgttaatgcggtattcactttcgccggagcggtaaaaacgacgcgtaacggaaacggtgtcgccgtcgtaattcaacttgcggtcggtgttatccatggtgacggtcacttcgcaaaagccctgcgctttgcgctgcggcgtgccgctgaagatgatgtcctccattttggagcagcgcagtgcgcgggtagactgctcgccgagtacccaacgcatggcatcgctgatgttgctcttgccgctgccgtttggaccgacgaccgccgtgatgccgttttcaaattttaaagtcgttttatcgggaaaggttttgaagccctgcagctccagatattttaaaagcatctgtttacctgcctatcgtagcctgtatgtgccgccggaaagcgaagcatccgggcggatgtgcacggtgtagccgtgcttagagaaatgctgcaaattttcttttttctgtccgagcgcaatggaaagcatgcgcgggtcaacatcgatcgtaacttccgaatcgtttcgggcttgaagcgctttaaggacgttttctcggaagatcgcgctgcggcacagctccataaaagcgggatgaaacggtcccgcgacacggttttccaattcttcgctggcgtgcagccccacacggatgagttttacaccgcgctgctcaatcatcgggatgagctttgcacagagtgaaacggcatcctctaaggtctgcggtgtgtattttcctgcgcggtacaaatcgcacagtggtgtgttttctaagacgatcgtagggtaaatacgcatggtgttcggctttagagccaacagcctttcgacagtcttcatcgcctttgcgtcactgtcgccgggcagcccggtcatcatctgcaagccgagctcaaagtcgtatgcgcgaattaaccgcgcagcgttttccacatcctttgcggtatgcccccgacgattgagcagcaacacttcgccatccatcgactgcgcaccgagctcgattgccgttacgccgtattgctttaatacggtcagacgttcatcatcaatggcatccggccgcgtagagcagcggataccggcaaagccgtatgtttcgcatgctgcgtgcgctgtttttaaaagcgctaaacggtaatcggggtcgattgccgtgaagctgccgccgaaaaatgcaatctcggcgttctgcacgtgctcccccatttgctttgctgcgctttgcagcagcgccgccacttcttcaggctgcggctgatgattttcacctgtaatgcggttctgattacagaagctgcactgctgcgggcaaccgttgtgcggaataaaaattgagatattcgcgtgcttaatagcccatcagctccagtgcttcgcgtgccgcctgctgttcggcttccttcttgctgcgtccgccgcccttgccgatgacattgctgttgaggtgcacctctacggtgaagtgcttgtcatggtcggggccatgctcgccggtaagaacgtattcgagccgttcaccggggttctgctgaatgatctcctgcagcatcgtcttgtggtctttaaacgggcgttcgcccgcagactgcgccgccggttcaatgtagtgcagtacaaagcgcttggcttcctccaagctgccggaatcgagatagatcgccgccgtaatggattcgaacacgtccgctaagatgcttgggcgttctctgccgccgctgtgctgctcgccgtggctgagacgcagcagctcgcctgcgccgaagctgcgtgtaaacccgcaaagcgatttttcgcatacgagcgccgcacgcttctttgtcagcttgccttcgggaatatccgggaacgctttgcacaggtattccgccgtgacaaaccccaaaatggaatcgccgaggaactccagtcgctcatagctctggtcgccgccgcggctctcgtttgcgtaggaggagtgcgtcagcgctgtgatgagcaggttgcggttcttaaatttatatccgatctttttttcaaattcatccaatgatctcatagtcatacctttgctgtcttgttattcgttcgtgttttccgttttctcgttttgcagggctgcggtgatctcacttataatgccggactcggcgtacttcaccgtaagcgcaatggcgtttttcagcgtggaagccttggcgctgccatgtaccttaaagaccggcttcgagcacccgaggatcggcgcaccgccgtattcgttataatcaagctcttttttcatggctttcatgtcgtttaaaaccattgccgccgcaagcttattttttaggttctttttgaaaacggccttgaatttattcatcagcgccatggcgacgccttcatacatcttaagaaggatattgcccgtaaaaccgtcgcacaccacaacatctgccgcatcaaacggaatgtctctggcttcaatgttgccgatgaaatgaacatctttgttttcgctcagcagtgcaaacgccgcgtgctgcagttcgccgcccttgtgcggctccgtgccgacatttgcaaggccgatgcgcggcttttgaacacccatgaccttctgcatatacacagagcccatcatgccgaactgctccagcatttcggggcggcattcgttgtttgcgccgccgtctgccagcatgaaaaagccctcggatttcggcatgagcggtgcaaatgccacgcgcttgacgcctttgatgcgcttgacgagcaatgtggcgccaacgacgagtgcgccgctgttgccggcggacgcaaacgcatcgcccttgccctctgccaaagcgcgcaggccaaccgccatagagctttgctttttggcgcgcgtgatcgctgtgggctcatcctccatcgtgatgacatccgggcagtcaatgatctcaaaatcagaaacgttaacattcagtttttccgccgccgctctgatcttcttttcgtcgccggttaaaacgatctgcacatggagctcatctgccgccagacggcagccttttataatttcgtccggggcgttgtcgccgccgaatgcgtcgattatgatccgcatgtttttccctcactttaatattcagcttccggcaaaagccggttttgttcgggcatttcggtttatcaaacacggattttccgccgataaaccgctttagactataattcactctattatagcaaaaaaacaacgcaatttcaataccgcgctccccataagttgcacaaaacaaaaaacatgcgccaggctttcccggtacacgtcttttgctgatttggaggaaaaattttgagttttgatttttagaatttatccggcaggcggatctcgcggcgcacggctgtgccgtcgatctcgttaaaccgcacggcttcgttctttacggccattgcggcggctacggcatcggcaatattttggagcgcctgcacgtttattacgatgatgattttatgtttgagatcgattccgccattctggtcggcaccacggtgacgatccgcgtcccctattcccgcaacgattccccgcagatccacgcggagcgccccatcggcagcgcagagcaaaattgatgctttatattgatttttactaaaatactacgcactgcatattcacctcttgtttttttcgcttgtctttgttatctttaaagcagcgcagcgtttatctgcctgatctaaagatgaaaagaggttcaacatgtatacccttagatcccgttccattccgctcaataccgattacgacgtgatcgtggtcggcggcagacgcattgcaaagcagtaccgcgatgccctcgcaacttatttcccggaggccttcggcaacgcgtaccttgttgccactgcgcccgtgattggcgtgcgcgaaagccgtatgatcgacggtgtgtacacgctgacggtcacggatctcaaggattgcgtacattttgaagacggtattgcggcgtgtaactatgatattgacattcacaacccggagggcaccggcacgagccattattacttcaaagagggcacgtactacaccattccctatcgaagcctggtgccgaagaacatcaaaaacctgcttgcagccggccgctgcatttccggcagtcacgaggcacaggcatccttccgtattatgcccacgtgttgcagcacgggtgaagccgccggtgttgcggctgccgttgccgcgcaggaacacaccgatttcccggaaacggacgtgaagaaaattcaagcattgctgcgtaagcaccacgcgtttatcggcgagtaaaatctgaaaatacagcgaaaagccctcgacatctgaaatgtgcttcagcttgtcgggggttttctatcgttcgtcccttatgcgtttttcagtgcttcggcaaggtcttcgagcgcacgagcggaaagcgcggcatagcgctcttttttgtcacgaatgtgcggctcaatgacgggcagaatgccgaagttcgcacccatcggctggaaatctttcgaggggctgtgcgcggcgtgctccgcaagtgagcctatcatagtagtgataggcagaatgagcggcgctttgccctctaaacggcgcacggcgttgcgtcccgcaagcaagccggacgacgccgattccatatagccctccacgccggtcatctgccccgcaaagaacagctccgggcgcgtgcgcatggagaaatccgcgttcaaaagcttcggcgaatcgaggaacgtgttgcggtgcatcacgccgtagcgcatgtactcggcgtttttcaggccgggaatcataccgaacacgcgcttttgctcgggaaatttcaagtttgtctggaatcctacaagattgaacagcgttttttctgcgttttcggtgcgcagctgcaccacggcccacgggcggtgacccgtgcgggggtcgcgtaagccgaccggcttcaacgggccgaagcgaatcgtatcgtgtccgcgctgtgccatgacttcaatgggcatgcagccctcgtagaccttcgggttcatcacgtcaaaatcgtgaatgggcgcgcgctccgcggtgataagcgcttcataaaatgcatcgtactcctctttgttcatcgggcagttgatgtaatcgtcgtcgcccttatcgtagcgggaggccgtgaagcagtgctccatatcaaggctttcgcgcgtgacgatcggtgcggcggcatcgaaaaagctgagcgcaccgccgcataagttcgtgatctgttcggcaagcgtgtcgctcgtcagcgggccgcttgcaataacggtcacgccctctgcgggaatttccgtcacttcgccgtgcatgacttcgatgttcgaatgctccgtgatcgcttttgtgacgagctctgaaaagcggtcgcggtcaacggcgagcgcgccgcctgcgggcacggcggttttatccgcacaggcaacgagcagagaatccatgcggcgcatttcctctttcaaaagcccggcggcgctgtcgatgcgcgcagccttcaaagaattcgagcagatgagctccgcaaacccggcgcttttatgcgcgggcgaaaacttctgtggcttcatctcgaaaaggcgcacagaataccccgcctgcgcaatctgccacgccgcttcggagccggcaagacccgcgccgataacggtgacggtctgcttattctccatctttctcccccgcgtcgtccttattgaacgtgtaagtgcagcccggcgttacgcagtagagcgtctgggccttgtcttttttctttaagagcaccttaccgcagaccgggcaggtcttgtcggacggcgcgtcccaagagacgaaatcacacttcgggtagttgtcgcaaccgtagaacacacggccgcgctttgattttttctcgatgatcttgccgccgcacttcgggcactttgcacccgtatcgttgacgattttctgcacggtcttgcactccgggtagccggagcaggcgataaacttgccgtagcggccgaatttgacgaccatcggcttgccgcagttcgggcagatgaggtcggtcttgtcttcttcaagctgaatcttcacgccgtccatttcagtcttcgcctttttgagcgtcttctcaaagtcgtcatagaagtcgtgcagcgtgtgtacccagtcttcctgaccgctctgtacttcgtcaagctctttttcaacggcggcggtgaacttgatattcacaatgtccgggaaacgctctttcatcagctttgtaatgacttcgccaagctcggtgggcttaaaggacttaccctcgcgcgtaacgtattcgcggctcgtgatggttgtgatggtcgcagcatacgtggacgggcggccgatgccgttttcctccagcgtcttgatgagcgaggcttctgtaaagcgtgcaggcggctgtgtaaagtgctgcgtgcctttgaggtcgcggactttcagggacatgcctgcttcaagcttcggcaggtctttgcccttttcttcttctacgtcgcggccctcttcgtagagcacagtgtagccgtcaaacgcgacgttgtagccgcttgctttaaaaatataatcgcctgcggtgatgaccgcctgcgtggtgtttaaaacacagttagccatctggcatgcgacaaagcgctcccaaatgagcttataaagcttgtactggtcttttgtaagggaagattccacgtccttcggtgtgagtgcaacggaggtggggcgaatggcctcgtgaccgtcctgtgcgttggcacgcgccttataatggcgtggcttagaaggcaaatattgcttgccccagcgctcgccgatgaactgcacagcctcctgcacggcgtcttcggaaatgcgcagagagtcggtacgcatataagtgatgagacccacggcacccatgccctcaatgtccacgccttcgtaaagctcctgcgcggctttcatcgtgcgcttcgcctgaaagcccagcttgcgtgaagcttcctgctgcaaggtggacgtgatgaacggcggtgcaggctgcttgttcttcttgccttttttgacggactccaccatgaatgcggcggattcgaggtcggcaaggattttatcggactgctctttgttcgtgattttaatctcgccgtttttatcgccgtagaacgatgcgccgaaaatgctgcgggagccctcagcggtcaggcgtgcgtcgatagaccagtattcttcgggcttaaacttgcggatctcttcctcgcggtccacgatgatgcgcagtgcaacagactgcacacggcctgcggaaagaccgcggcgaatcgtttttgcgaggaacgggctgagcgaatagcccacaaggcggtcgagaatgcggcgcgcctgctgggcgttcacaaggttctggtcgatggaacgcgggtgcgccatgccctccgtgatgccggttttcgtaatctcgttgaacgtgacacggttgtggtaatcctcatcaaggccgaggatatacgcaaggtgccaggagattgcttcgccttcgcggtcggggtcggtcgcgagatacacggtatcggcctcttcggccgcttccttcagtttggaaacaagcttctcctttcccttgatgatggcgtatttcggcttgaaatcgtttttcacatccacgcacaggcgcgccttcggcagatcacgcacatggcccatggaagcgatgacttcatagtcgccgcccagatatttcttgatcgttttcgccttggcaggcgactcaacgataacgagtttcgacatggttttctatctcctattctgtatctatttaaaccgcacagcgaatgtgcgagtggaagaatcatatattaggtgcatttgaaaacaaagaaaatgcgaaacggacaagcttccgatttttcaaatacaccttagtatagcgtacttttacgcctttgtaaacctctggccgggataagttttgatgaggccgaaaagctcgagctccgtgagtgccgccaaaattttccccgtggacatgcccagttcaagctccagctcggaagcgtgcttgggggtatcgttcagtgcggcgtaaacgacttttgcatcttcagaaacattttgcaaaaggttgttttcgggcgcagggatcggctcggcaggcttcttctctgctatttcgggttccttttccgtatcggaaagcgacgcaatcttcgggcgaacgcgggagacatgggagatattttccgctgtgcgggcaagctgttctatacgctcctgtctgcggcgggaagcaaacggctttaaaacatcctctgcagtgtaaatgcgcgctgcaccgtcctcttccagtgcgatacagccggaaaacgctttctcgtcttcgccaatgaatacgaaaacctcgcgattctgctctaaagcatgctttgcggtgatgagtgcaccgctcttttttggcgcttccgcaatgagcacgccgtgcgccatgccggagatcagccggttgcgcacctgaaacgcgccgcgctgcacaggcgtgtgcatgggatattccgtgacaagtgcaccgccgaaatcgacgatctcgcggcgcaaaatggcgttgtccataagatacggatattcgagcccgcacggcaaaattgcgattgtcttgccgcggccgttcagtgcacccttgtgtgcctcggaatcaatgccgagcgcgccgccgctgataacaacggcgtttttgagcgcaagcccataggcgatctctcttgcggcattgagcccgttttgactggctttccgcgtgcccacaatgctgatggaaacggcatcggaaaggatgctcaaatcaccctgcacatataaaacggcgggcggattgtagatttctttcagcaatacagggtagtcttcgtcatcgggcgtgatgaccttttgaccgagcttcaaataatactcgagcgctacggcggcctgttccacgccgtaggcattgagcgcggcaagctctttatccgaaacgaacgaaaaggagctccacagtcgtgtgccgccctgatacagcttttcggcactgcctatgcggcgcacgagctgcacaggcttcgggctgcctgcgccaaacgcgttttgaagccagatccagtatacgcggttatccatggcttgtgcctcctgccccgttgcgctccatttcccacagaacaatggcggctgcagtggaggcgttgaacgattccgctctgccgcgcatggggatcgtcacgcggtcatgacaatgctcgatggcttcatttgtgagaccgttgccctcgttgccgatccacaccgcccagtttcccgtttcaaacggaatggtcgtgatgggcgtagcgttgctgtccggcacggcggcgagtgacgtgatattctcggcatgtaacactttcaggcaatcctctgccgtctcaaaacggcggatgccgaggcggaacaccgcgcccatgctgccgcgcagcactttcggggcgtatacgtcgcagcaggtacccacaagcgccaaatgccgtacaccgagcgcttccgctgtgcgcagcacgttacccatgttggacgggtcctgaatattttccataacaagcacatgacggcacgggcgtgtatccgactctgcggaaacaggcaggccgtccgcacggcgcttcggcatgcgacacacgcagaaaatgccttgcgggttctttgtatcggacagcatgggcgcgatgtgctcctctatgcagtatgcgtgctctgtctgctttaaaaccggatctaaataatctttgtattttttagcggcgttttccgtaaagaagcacgcggcaatctccgtttggctccttgcggcatcggcgcaaaggcgtgcaccctcggccatgaaaaggcctgcttcacttctgttttccgctttctgcaaaagtgcggcggcatttttaacgacgctacttttacggctggtgattttttcgattggcacggtacacactcctttttaccgataataagcagaaatcctgtgcgctgtattttacggcacacgggaaatttccgtaaaggcgattttgcacaaagaaatacacttacgtttgcaactatcaccctaaaaaatgtgcgcccggaagaattccggacgcacggatagcttaattatacagaagcctttgccttctcgacaagtgccttgaaagctgcttcgtccgcgatggcgatctcggaaagcatctttctgttgagcgtgatgccagccttcttaagaccgttcataaatgcggaataggtggtgccgttagcacggcaagccgcgttgattctggagatccacagacggcggaaatctctcttcttctgctttctgccgatgtaagcatagttgccggacttcatgacagcctgcttagccatcttaaagtgtctgctcttggaaccccaatagcccttagcgagcttcagaaccttttttcttctcttgcgcgtagcgagcgcacccttaactctagccatttataaaaacctccgattatgctttacttaaacttgagctgccctgttcgcttatgcgtaggggagcatcttcttaacagcctttacgctggtcttatccgtaacggtcgtgccgcgtgcatggcgcttggacttagcagtcttgccatggccgttcagaaggtggctcatgtaagcgtggccacggataactttacccttcttggaaatcttcaggcgcttcttagcaccgctgtgtgttttgagcttcggcattttatagtcctccttgaaattgttacttaacgggcttgggggcaaggaacatcagcatgttgcgcccttcgagcttcgcgggcttatcgacgtttgccgtgtcagcgagcgattctgcgaaacgcttcatgatgtctgcacccagttccggatgacccatctctctgccgcggaaacggatggaaaccttgaccttgtttccgtcgttgaggaaacggatcgcatgatttcttttcgtctcgaagtcgtgggtatcaatgttgagagacaaacggatctctttgatttcaactacgcgctggttctttttcgcttctttttcacgctttgcctgttcgaaacggtatttgccgtaatcgatgattttgcatacgggcggcgtggcctgcggggcaatctttacgaggtcaagatttttctcagccgcaaggtttaaagcgtcacgggccgacataatgccgagctgtgcgccgtctgcgccgatcacacggatctctttatcgcggatctcttcgtttatctgcagttcctgtttgctaatggttaagcacctccatcacgcgtgcgataacttgttttcgcgaagccggcaataaaacagcgggcagagaacctctgcccgcaaatcaactcaatcaaacacacgaatttatcgtgattcttctcgatattgacctgtgtcagacggtactgcacgggtgtgagccatagctccgctttgttttctaaatattatattaccacaaagagcgcgatctgtcaataggcaaacagggcttaaaagaaattttattcttttccccgtgcataaacaggggcgttcatataaaaagagtaaagcacggtgtctttcacttcgttattcatgacgcgggtcatcgcttctttgtagagcgtgagctgcgggccgtatcgttcccacaattcctgtttattgtagcaccgatcggtcttaaagtcaagaatataaagcgaaccgttttcttcaaacatgcagtccactgcgccctgcaggatcatcggctgcgcggcatcttccccgctgagtgttttatccgtaagtcctgcgggaatggaaacgatgaaccgctgctctttataaacgcggtcggcatgtaaaacacgctgcccgagcgggccggtaaagaacttttccacacgggtaagatcgacggcgtttgcctgcgcttcggtgagatagctttgctcgataaggcgtttgagctccgcttcggggtcttttgaagcggcggaaaaatccgcaaactgcatgaagttgtgcagcgccgtgccgcgctctgcgggcgtcagtcccttggcgctcaaaaacgccgggcgtgaaagtgtggcttccgtttcggcttgttctgccgcaagcgcggaggccgcgaccttcgttgcaagctttgtctgtgcggcgtagggatacacgaacgaaatatccctttcaatgcgcgccttaagcgcttcatcaaccggtgcgggcgcttcggctttcggcaggtcggataaaatctgcggttcactgtatacgacgcgaatatcccacggcgtgtagtgtgtgcgcagaatgatgtcgtcatccgcttcgatgcggcggcgcaggtcatttccgttcgggtgccgcagcgcacagagcatcagccactccgaaatgccggaagcgttgctgacagtgtacggtggcacggtctcctcctctgtgatctgtgccgcaagcttttgcaggtttgtatcgatatttttcacggtggaaagcagaatgagcttctctttggcacgggtcatcgcgacgtagaacacgcgcagctcctctgcggaagcgctttccgccgttgcaaggccgatggcctcgcggatgaacgtggtgcggcgcacaccggtctcggggtctgtaaggcgcatgccgacaccgagctgtgggtgcatgcgcaggtcgtctgtatcattcacgaatttccggccgcagcccgcgatgatgcacacgggaaactccaagccctttgatttgtggatgctcatgatgcgcacgacgttggcgttttccgagacgacattggcgctttccatatcggatcgattctttttcaggcgatccgcaaagcgcacgaagccggaaacgccgctgtacccgtaggcttcgtattctgccgcgtatttttccagcaggcgaatgtttgcaaggcggctttctccaccgggcatggcgcgcacgatgttctcgtaaccggtttcggtgcacagcatattgataaagctgtccgcaggcatggtggaagcgagcgctcggaaacgcgtcagctcatcgcgcacacgcacacagcgctcgttttcggcgcgcagaagcgaaacgtacaacgtctcttccccgcgcccgcggcgcagttgcgccatatcttccgctgtgaagccgtaaatggggctcatcaaaacggagagcagcggaatgtcttgatccgggttatcgatgacgtttaaaaatgccaagatgagcgagacctccgccgcggcgaaaaagccgcccgtgacagccgcccacgtgggaatgcccgcattgcgcagattttctgcatagacaggtgcatatttattggagctgcgcagcaaaatgcagaaatcgcgatattctatgggacgctcctggccgttttccgtgacggtgaagccgctttccatcagctcgcagatgatttttgcgatacgctgcggctccagcacctctgcgcccacgccgtcgatgtcttccaaaaactccacgcgcgtttcgcagcccgatttttcggggtactgcgcgcccgccgcaagcttttcatcgccgacgtaatcgatgccgccgcatgtgcgggacatgagctgcgtgaaaacaaagttgacgctttccgtcacggttttgcgcgaacggaagttgcggtctaacacgatggatgccggatatgcgtccttttcgcggtcatagcgcggaaatttatctttgtagcggataaaaatatccggcattgcctgacggaagctgtaaatactctgctttacgtcgcccaccataaagcggttcgcgctgttttgggagatggattcaaaaagataatcctgcacgtcattcgtgtcctggtattcgtccgtcatgatctcgtcaaagcgctcggagacgagctttgcggtctctgtgcgccgaaatgtaccgtcttcctgctccgttaaaaacagctgcaaggccatgtgctcaagatcactgaaatcgagcacatttttctctcgttttttcgcactgtatgttttttcgaacgactgcacggccagaaacagatagacgaccgtgccggttgtggcggcgatttcctccgtgaatttctgatcttccgcgtcgcctgcaagcttttgcagtttgcctatttccttttttaccatatcgcgcatggccttgatgcgatcggcacgcgggtcttctcctctgaaagaaccgagcttatcgaacgtgacggtcaagtcggaaaagcggcgggtttcagggtcttccattgcctgcagctttgccgaaagcttatcaatatccgcgccgagtgctgtgcagtacgctttttcaaggtccgggtcttctgccgcaaggcggtatgcactgtgggaaagcttgattgcgaagtcatagacctccacgatgtgctgccggacgacctcgccccacggtgttttgaccggggattgcgtgacatccgtcatcgccttttgaatgtcccgcatccatttgtccggaaacggatggctgcgcgtgtattcgtacattttgagaattgcggcggaaaggcgggcgtcatttttgtcgccgccgagcacatccgcaaggtctgtcttaaagttttcgtctttgtaccactcggtcagtacttcgtcgagcgattcggtcatcagctcttcctgttgcttatcggtgatgattgagaaatcgggcgagatgccgagcaggtagaaaaattcgcgcacaatgtccgaacagaaactgtccaccgtgcagatgtgcgcctgctgcaataaaagctgttggcggcgcaggcgggtgttttccggctgctccttcatgagtgccaaaagtcgcttttcgatgcggtcgcgcatttcggctgcggcggcttttgtgaaggtcacgacgagcaggcggtcggcgtccgtaggatgctccgggtccgtcaggcgctcgataacgcgctccacgagcaccgcggtcttgccggaacccgccgcggcggagacaagaaccgtaccgcgccgcgctttgatggcgtcgagctgtgcgtcagtccaattcggcattttctccactcccttcctctaagtcattttccatgcgcgcgagcgcttcgtcgtttttcatgctgttcttttcgacatcgtccgcagcatgctcggagccgcagacggacgtgtacgggcaccacgcgcaggcgttgatgttctgcatcagcggttttgccatgatctcgccggcagaaagttcctccgccatcgttgcgatgaggcgctccacgtagcgcaggacgatctgcagctccggctcatttaaagcggaagccgtaccgctgagttttcttgttttggtgagataaacaggaataaatcgaccgttcagacccatttccattgcattcaaaatttcgttgtcctttaaaagcaggccgttcatgcgcaggtttttttccacttcctgctttagcttatcggcgctttccgtgccgtccgaggtcacacttgcaatgaacgccggcatgtacaaaatgcccgccgggtgcagggctttattctgcgcgagcgccgcgaggtaaataagcatttgtaagctcatgccgtacagaacatcggcgagcttaaactctttgcggccggttttataatcgacgacgcgcacatagttcgtaccgttttcatctttatacaaatccacgcggtcgatgatgccgccgaccgtgacgaacccgtttttcgtcgggatgcgcagcggcgggtacggtgtgccgtttttgagctccagctcgaaatgctccgggcggaacaggctgtgcatcatttcttccgacatgtgtgcgatgagcttcacagccgtttgctccatgcggtacaagcggtatttttcgcgcggcgaaagagcatcatagccgcccatattttcgcgcacatagtccatgatactcgtatgtacgcgcgcttttaagtcatctgcatgaaggtgcagtgcttgaatgtcttccgcactgccgagaatttgctcgaaaagatagtgcatcagactgccgtattccagcgcatcgatctctgccgggcggcgctcctttgcaccgaggccgtagcggcagaagtatttaaagcggcactggtggtaaacttcgatttggcttgcggaaaagtaatgcccgccgccaaaatagtcgtttgcggtctccggcgcaaggtgagccgaagccatgcggtctgtgccgccgaggacctgcaaacgtccggcgaactccggcttttcgcgaaaaacactttttaatgtctcggagacggtcgagttttcgttgaaaagcgacgccgtttgcgaaaacgcggcttccggtgcgtttgcgaaaaactccggcggcaggttttgtgtgatttttaaattcggcagcgccagctcaactgcgctgatgagctcaccgggcgattttgcctcctgccctacactgacgggatacgtaagatacagcttctccgaagcgccgcacagcgcggcgtaggcgaggtacttttcctgtaacatgcggtcttcgagcacatcggagacgggcagctcgagcgcaaggagcgtgcggcgctccggctcgctgaacacaccgtttacggacggaatgagcgggaactcgccttgcacggcgccgagcaggaacacggcgcgcggcgcggactgacggatgcggtctgcagtgccgaatgtgatgctgtccatgctctgcgggatgtccgaaacatcctcgccgctgacgatctcctttaagagccttccgtatttttcacccgtgatgatctgttcaccgagcacgcctgccatttggtcgagtacttccatgagcaaatcccaaatgcgcatttgagcggcggaaaggtcatcgcgcccggcgttttcgagcgtgcggcaaaatatcgggaagctttgctccaaatcaaaatcgatgagaagcgtataaacggcttcggagatctgctcgccggaagcgtgtgcggtgcgctcggagaattttataagcggtgcggtgacgcgctcgcgcagagcgttcagcgtgcgcagtgtctcggccgcagtgtcatccatcggcttaccgaagccgtccgggtgttttgtgaaagggctgcaccaagcggatgcgccgtttaatttccaggtataaacgtagttttcaagctgcgcgagctcttctgccgtaaagtttgtgatgcccgttttcagcatggcgagcacatcttccgaacgccatttgcggctgcccgaaacgatttgaaacgcggagagcacgaagcgcatcagcggctcggcatcgaccgtgcgcgcttcggaaagaaacgccggaatttcccagcggcgcagcgcggcggcaaacagccgcgtgtagcgttcgccgtcacggcagatgacggaaatatcgcggtagcggtagccctcgtgcaaaacaaggctgcggattttagccgcggtgaagtccgcttcctcatacggagaggtcgcgcggaacacacacacgttttcagctgtatctgcttgctgtacgtggccggcgtaggtgctttccacggcgcgaagctcatcgttttgaaagcgatacggcgttttacagtacacaggcgaaagcacgcccgtaccgctctcctttgcaaggcgcatcaggcgcgaagcggtgcggcgcacagtagaaaacaggtctttgcggctcgtgtcgagatcgtcgcagcatagcgaaacactgactttttccgcatggcgcagtgcgtggcgcaaaacgcggtactcctgcacggtgaagccgtcaaacgcatcgacggcgacataagcatttcggaaaaaatccggatggtcggccagcaggtcatcaaggcgcgtcaggtcgtcgagcggatcgagatacgtttgcgcgatgagtgcttcatatgtaccgtaaatgagcgcgatctcttttagtttgcgcgaaaggctgtcttctgtgacggcttcggcggtttttgtgagcatatcgggctcgatgccgcagattttcatttcaccgacggtgttcaataaaacgtccgtcatgcgatcggcgcttttttcaaacagcgtgagttggtcggcgcagttttcaagcgccaaggtcatcaaaatacgcctgccgccgtccgttaaacgcttgcctgcaccgcctccgtactgcaaaaatgccgcctgcgcaaggcgcgtaaagctgtacacctgcacacggttcgcggtttcagcaccgtattccataagcagtgcgcgttcggattcaaacgtatattgttccgggacgatcaagatcgttttcggcgcagtgctttccgcaaggcgtttacgcagcagcgtcgttttgcccgtgccggcgcgaccgaggatcaactccagcattcttcttccccctttttccgtttagagcttatactgctcttattttagcacatgtgcgttcacgcgtcaaagagttcgcggagacgtgagaaaatttccgccaccttgaatttgacttcgtagctttccggttcacgcacgagtgtatcggtatcatcaggcaggttggataggtcgcttgcaccgggcatgcacagcgccggaaacacgacgcaccaccagtttttgccctcggctttgccgagcgaaatgcgcagtgtgcggtagcgcccggcgggcagcttgaagctctcgtaggtgcgggtcggaaagtacatttcgcaaatttccgctttggcgcagtacgggaggttttcggctttcaagacagaatttgctgccgcttcaaggctttcaaggtgcgtgcagagcgctgtgacggcagtgtcaaaatcttccgcatcgccgtaccactgctcggcttcccgcagcacggcatcgcgcacgcggagctttacggcttgatccgctttgtcgtttgagtttgcaatgacatgcagccgcacgatgttctcttccagtgcggcacactgggcggagaagcccactagatttagaagcaccgttaagatcagcccgcacgccatcgcgcgcagaagaagcgttctgctatacagtgttttgattttacgcatcatagatttattctccctgcatatttttgtcgttacacaaaattccatttaattttttgtataaaatatgggcagaaaatttgcggtttatacttttcgcaaagctaaatttccgctatactatataataaactatgagcatcaaaacgggaggaatttttatgaactggacagtaccgaacaccgaaagccttttacgccgcctaacgaaaccgaaaggtaagattgacgtggttttggacaccgatacgtataacgagttagatgaccaatttgcgctttcgtatatgatgaaaaacagcaacaagctgaacgtaaaagcgctgtatgccgcgccgtttttgaatgataaatccgtatcaccaaaggacggcatggaaaaaagctatgacgaaattctaaagctgctgacgcttttaaaacgcgaggatttaaaagccgtcacgtttaagggctcggaaacatatctcacggacgaggacacgcccgtgctttcgcctgcggcggaggacctcgcaaagcgcgcgatggattatacacccgaaaagccgctgtatgtcgtcgcgatcggcgctatcacgaatgtggcttccgccttgcttttgaagccggaaattcgcgaccgcatcgtccttgtatggctcggcggcaatgcgctgcactggccggacaaccgcgagttcaacatgtatcaggatgttgcggcgggacgcattgttttcggatgcggtgcggcgcttgtacagctgccgtgcgcaggcgtagtctccggcttctccgtgagcgagccggagttcaaagactactttctcggcaaaaacgagctgtgcgattatttggcacattatgccattgaagaaggtcggcgctgggcgcaggcggaaacatggtcgcgcgtgatctgggacgtgacggcggtggcgtggcttttggacggcgagttcatggacgacacgcttctgcacagccctattccccagtatgacgacacatggacgccctcgaacacgcggcattttatgcgctatgtgtacaatatccaccgcgatgttttactcaaagaccttgtgcaaaaattgacgaaaaagtaaatttttcgtgcaatttcggcttttacgtgctatacttaattttgtagtaaacagaatacgcaccttttcccttattttgatccgaaaggttggctgtctcatgaaaaaactgattcttgtgacctcaccgcccgcgtgcggcaaaacccggctttccaaacgcctgtgtacggcgctggatcatgttgtttatttggataaggacacgctgattccgctttccaagcaaattttcaaagtggcgggcgaaccgtatgaccgcagctctgcgttttttgaagcgaacatccgcgactacgagtacgagacgatcttggaccttgcgtttgaggcgctgcgttatgcggacaccgtgctcatcaacgcgccgttcacacgggaaattcgcgacacggcgtacattcagaatttgcgcgcaaagctcggtgaatatggcgcaaagctgtgcgttatttggatcgtaaccgaccccgctgtgtgcaaggcgcgcatgatgaggcgctcttccgaccgcgacacgtggaaaatgaaacactgggacgagtacataaagagcgtgaattttgatattcccgaaaatctgcgtataccggacgacccagaaagtcttttgctgtactacaactcgaccgacgaccttgcggacgcttcatttgcccgcattttaccgatgttgaaccaaaattgattttaggagcctactcatgcagaaaaccgataccctgtataccgcatacgttgaagttttaaaagaagaattgctgcccgccatgggctgcacagagccgattgccattgcctatgcggcggcagcggcacggcgcattttaaacgagctgccgtgtgaagtctgcgtcacggcgagcggcaatatcatcaaaaacgtgaaaagcgtttttgtgccgaacaccggtggtctgcgcggcatccctgcggcggctgcggcggggatcatagcaggacatgacgagcttttattggaggttatctcaaaggcgaccgaagcagagcaggcggagatcaaggcttatatggagcacacgccgatcaccgtaaagctttcggactctccctatattttcgacattgacattacggtgaaaagtgagcatcacacggcaaacgtacgtattgtggggcaccacacgaatattgtgcatacggaaaaagacggcgaaatattgctcgatacctgtgccgatactccggcggaaagcacggacagcggcatttgcgaccgcagttcgttttcggtgaagacgattcttgagtttgttgagtgtgcagagctttgcgatattgaaacgcccgtaaaacggcagattgactacaacacacgcattgcgaaagaaggtttatcgggcagttggggcgcgaacatcggcaaggtattgctcgaaacctacggcgatgatgtgaaaatccgcgccagagccatggcggctgcgggcagcgacgcgcgtatgaacggctgctccctgccggtcgtcatcgtttccggcagcggcaatcagggaatgacagcttctctgcccgttgtggagtatgcaaaagaattgaacgtcggctatgaaaaaatgattcgcgcggtggcactctccgacctcgtgacgatccacctgaagtccggcatcgggcggctttccgcgtactgcggtgctgtgagtgcaggctgcggctgcggcgcgggcattgcgtatttatacggcggcgggctgaaagaaatcgagcacacaatcgtcaactccattgctattgattccgggatggtatgcgacggcgcaaaagcctcgtgcgcggcgaaaatcgcatctgctgtggatgccggcattttgggctaccacatgtacaaaaacgggcagcagttccgcgcgggtgatggccttgtcacgaagggcgttgaggagacgatacgcaacatcggtatgctggcccgcaaaggtatgcgcgagaccgaccgcgagattttgcatattatgtgcgattaaatgtgataaacaaagaaacgtttctctgtagttttacaggggaacgtctctgttcattttacataaagcgctccggcagacgaaaacagtccgccggggcgcttggtatgttatagactttgcttcaagatttcttctgcgcagcgcagaccgtctacggcggcgctggtgatgccgccggcgtaacctgcgccctctccgcacggaaacagaccgcgcaccgtggggcactcacgcgtctcgtttcggaggatgcgcacgggtgaagagcttcgggtctcgggagcggtcaataaagcgtccgggtcgtcaaagcccctcagccgtctgcccatgcggcggatgccctccgccatggaatcgcagatataatcgggcagcacggtccttaaatcgccgggcacaactccgggccgataggtcggctgcacgctgccgttcagcgcagtcgttgcgcggttttcaagcaggtcgccaacgcgctggcatggggcactgtatgctcccccgtccgcttcaaatgcggcgcgctcgattttacgctgaaacgcaatgccggcaagcggatgcgcggaaccgaaatcctccggcgtgatgccgacaagcagcgcggcattgctgttttgaccgtcgcgggcgtattcgctcatgccgtttgtcacgacactacccgtttcggatgccgcaccgacgacgtagccgcccgggcacatgcagaacgtgtacacgccgcggccgttttcaaggtgaacgttgagtttgtagtccgccgcgccgagtgcggggtcgcctgcaaaatcgccgtactgtgcgcgatctatcgtctctgcgcggtgctcgatgcgcgcgccgacggaaaacggcttcggctccataggtacacagcttttttcaaacagcattttaaatgtatcgcgcgcactatggccgacagcgagaatgacgtgtgcggtctcaatcgtctcattcacaccgtttgtctcggcaacgacaccgcaagcagcattgtttttgacgagcaggtcggtcatctgcgtgttgaagcgcacttcgccgccgagagacttgatctcctcgcgaatggcgcggacggtttgcggcagcttgtccgtgccgacgtgcggctttgcgtcaaatagaatgtcttcgggtgcgccgtgctcgcagagcgtttgcagtacgaagaaaatgcgctcatctttcgtgcctgtattgagtttgccgtccgaaaacgtgcctgcgccgccctcgccgaactgcacgttgcagcttgggtttagttttcgcatctgccagaaggtgtttacggccgcttggcgttcttctacggagccgccgcgctctaaaataatcgggcgcaggccggcgcgtgcgagcaataagcctgcgaacatgcccgccgggccaaaacccacaacgaccggacgctgcgacaatgtaccgtgcggcggtattgcataggttcttttcggcgcttttgtgacgtggctgtcgcgcacgcgggaaagcagcttgtcttcgttgccgtccgtttccacatccacggtaacgacaaagcgcacgtcctgcttttttctggcatcgacagagcgtttgacaagtgccagttttttgagcttctgcgcatcggtacgcagttttttggcggctgcgcggcgcaaagcttcgtctgtatagtgaagcggcatagaaatgtcgctgatgcgtatcatcgtttttcctccttcaggcagcgataggctgcgctttttccggctgtgatgccgcttgcccacgcaaaatgcagattgtagccgccgcaatcgccgtgaatattcagcatctcgcccgcaaggtaaagccccggggctttttttgatgccatcgtgtgcgggtcgagctccgtaagcggcacgccgcccgccgtgacctgcgccgcagaaaaatctttcgtgccggtgatgtccaacctccagcctttaaggagagaagcaagctttttaagctgtggtgctttgatttttaccgccggttcgctttgcgcgatgcccgccgcgccgacaagcatgtagccgagacgcatattgagtaggccggagagcagatcgcccgctgcacgtgcgggatacaattttgtcatctcaaggagataatcaagcacgtcctgataggccatgtccgacaatagatcaagctgcacggcgagtgaattgtacttcttattgcggattgtgccgagcgcaaagaactcgccggcatacacggaaaggccgaacacgcagatgccggagataccggtatccgtaaactgcacctcgccgctttctttatagacgggtttgccgtctgccaaaagcacggcatttgcaggggcgcgcgtgccggacagcgttttccactgctttgcgcgcacggtaaactgcgttaaagacgggtacagctttgtcaccgtgtggccgagctgctttgcgagcgtgtagccctcgccgcaggaatggcgcggagatgccgcaccgccgcacgtcaaaatacactgctttgtgaaaagctgcgtgccgtccgtacagatgagcgtaaatccgtttttgactttctcgatttttgagacggtgtgttcttccgaaaacgacacgccgtatttttcggcatcccaccgcaaagcggagagtacggccgctgcctgctgattctgcgggtataccctgccctcgctgtccggcttggtgacaagccccatttcgcggaacacggcacaaatagcttcgggcgtgtattcatgcaataggtcttgaattgccgtaacatcgccgtggtaatgtgcgggcgaaacgtttaaattcgttaaattgcagcggccgttgccggtggcgagcagctttctgccaagctttgcgttgccctccaaaacaagaacagaaccgcgttttttcaaaacatgtgcggcggcacacgacgccataagccccgctgcaccgccgccgatgatgataatgtcttttgtttccatttaaacttccttattaaatgaacatgccgagcaggccgtaggagaagattgccattaaaatatccgcgatgagcgtgccgccgatgacggagaaaagcgcgtctttaatgggcattttcatcagcgccgcggcaagcgaacccgtccatgcgccggtgcccggcagcggaatggcgacgaagatgagcaggccgaacgtcttgtatttttcaatctgcgcaaacttgcttctgcccttggcttccatgcggtcaacaagctttacaaagcgcgtgttgcgcatccagtcgaaaatcttattgataaagagcaaaatgaacggcgttggtaaaatggtgccgatgaagcagatcagcatggcaggcaataaatctacgccgagcattttcgccgcaacaagaccgccgcgcagctcgatgatgggcatcatggagaggatgaacaccgtaagctcacccggaataatatttctgaaaaaattgacaagtgcttctaccatactgaattgttcctttcatgatccgttctttttcaagtttcgtaaaagttccgcaaataagtatactaaacgtcatggtttttatttttctttttaagaattatagcttacgttttgctgacaaaacgtgctcaagatgttttctgtgcggcacaataggcttcaaggtcgccgaacgagtagcccgtttcttcccattttgtaaggagctcatctaagatttcggcgttcgtgctcgacgtgctgtgcagtaaaacgaccgcgccggggtgaatgcgcggtaataatttagaaaatgcctgctcgggtgtgggctggtcatccgtataccaatcgacataggcaaggctccaaaacaccgtggaatacccgagctgctgcgccattttgaggttttcctcacagaatttgccctgcggcgggcggtagagcttcggcatttcgctgccgagaatgtccctgtacagcgcttcattcttttgcagctcggtctgaaagctttggatatcgccgatcttcgacatatccgggtgcgaatacgtgtggttgccgatggtgtggccttcctctgccatgcgttttacaagctccggctgcgtctcaaaataattgccgacgagaaagaatgttgcctttacgccgtgctttttgagcgcgtccagaattctctccgtgttgccgttttcaaagccggcatcaaatgtgatgtagatctctttttggttcgcgtcgccgacatacagcgcgtcgaaatttcttaaatactcctgcgaggcatttgcaacgggcggtgcgccctcgctttgaaagctcaaaccccaatcggtaatacctgcggcggcctctgccgcacccaaacggttgactgcgcgcaaagcgcaaaccataccgatacacaagagaatgattgccaaaacaacataaagcacctgctttttaccgaatatgtgcactttcattctgcgttccccctatttctttttataaagagtatgtgcagccgcataaaaaagaaccgggatagcattgcgaagcacatgaaaatcctgtacaatgataaaaagatgaattgtaagctgattgtaagaattctattcccgattttgtaagaggtgttctgtatactttcagcatggagtgaaaaggagggcattttatgccggatatgaataagaaaaccattttggttgtggatgacgaccacgagatcgtgcgcgccattaccattacgctggagcgcgagggctaccatgtgctgaacgcttacgacggcttgcaggcgctcgattgcgtgacctcccgcgaagtgcatctgatcatcatcgacgtgatgatgccgaagctggacggactttccgccgtgatgaaaatccgcgaaaagaaaaatctgcccatcatcattctttccgcaaagggcgaagacagcgacaaaattcttggcctttccatgggcgcggacgattacatttcgaagccgttcaacccgatggagcttgtggcgcgtgtgaaatcgcagttgcggcgctacactgacctcggcgacatcaacacgcgcagcgacaacgtgatcgtgaacgggcgtttgacgttcaagctggacgagcacgtgctgtatgcggacggcgagcctgtaaaactgacggcgacggaaacgaaaatcgtggagcttttgatgaagcacccgggccgcatcttccccgccgaagaaatttacagccgcatctggaacgaacccgcgtactcggcggaaaacaccgtgatggtgcacatccgcagaattcgcgagaaaatcgagctgaacccaagcgagccggaatacttgaaagtggtatgggggatcggttatgaaattgaaaagcactaaccttgcccgcggtgttttcgcctggttctgctttttgctctgcgcgttttctattattgcggggttgacttttgccatgtactacccagatatatttgaagccataccatctgcggtagataaatgcggtcaggcactttcaggcgatctgcgtgaaacagatagctacaaggataatgtttccattctgtttgagcggctatattacagcacgcaaagcaatgctgcttcaaacacctcaaccgatgtaaccgcggaaaaggacaacgatgtaccctcaaacggctatcactactacatttcacgggatgaatccagcacggcactttcttgggtctatgtggaatcgatctcaaaggatgttcttttctcggtaacggactacagcacagaccccgccggcaaaacgatcacgaacgactcgaactgggatgcgcagacgctgccggagggcttcaattaccttttcacttgtgaaaacggtgtgacaaaaatttactacagcgacaaagacggcgatttaaactgtgttttcagcagtgatacgcctggcgcattttacacgctctcgctttcctacacgcttggcgcattaaagcaaagcaatgctccatcaccgaaaatcagctttgcggtgcgtgaaaagccgacctcttattctttatcgaatgagatcgtcagcgatgcgcagacttgggtcaacaatatacgctttgctataagtcttgttgccgctgcggtcgtgatgttcactttgatgctgctgctttccattttgttccggcaggacagaaagctgtttgagcgttacattgcacacggactcaaatggatttggatagaagtcaaagtcatagctgtatttgtatgggcttttgttgtgctcaatatcatttcgtatggatttgaccctgcaggcacagctgttaccctgttctccgtgttctttgtgttctatttgctcggcatcgatatttctcacaaccggcggatttatcggcacaacatcattcattccgttttgaagcttgtgcttggcaaccgcgaaggaaaaaaattcgagcagattgtttaccgcaaatacatggcgactgccggtattttgatggggctttgcatcgtaggtattttaggatatgttttcttttacagccattggttgatgggtacgatttggtttgtcgcgttttacgtcggtctgtttttcgcgggtgtgggtacgcttgtatggtttgcgtgggcactgcgcgacgacctgcgcgattacggcaagctgatggagcaggtggagcaaatgtacaagggcgaccttgacgcgatgaatcacctgcccgccacttccccgctttatgattccgctatgcagctcaatatgatccgtgacggcatccgtatcgcggtggaggaaggcatcaaatccgagcgcacgaaggtggagcttatcacgaatgtttcgcacgacatcaaaacgccgctcacgtccatcatcagctatatcgaactgatgaagaccgagccggatctgccgccgcacatgcaggattatttgaagatcgtctcgcagaaagcagaccgtctgcgccacatgctgcaagatattttcgatgtctctaaagccgcaaccggcaatattacgctgatgccggagtacatcggtctcgataagcttttgcggcagacgctcggagatatggacggcgtgatgaacgacagcgagctgacgtggcgcgtgcagatcccgcaggaagacttccccgtttatgctgatgggcagcgcatgtaccgtgtgttccagaacctcattaagaacgcggcacaatatgcgcttgagggttcgcgtgtctacgtggagctgcaaaaacagggtcaaaacgccgtcgtgacgattcagaatatctcgaaatacgagcttaccatggacggcgattcgctgacggcccgctttgtgcgcggtgatgacagccgttccacttccggcagcggccttggcctttctatcgcaaaaagcttcacggaggcctgtggcggtactttccacgtgaccgtaaagggcgacctttttaccgtgatgattaccctgccgctcaaagagccgccgaaggagccggaaaaggaaccgctgtccgaaacggcagacgcagagaataaagcaagcgagccggaagccaagcccaccacgctccccgaagcttcggagcagacagaaaacaccgaatccccggagtcttcggaacccgaaaattgaaaaagttgagtatataaaaccgctcgcaggaaattagcctgcgagcggtgctactatgcaaaagcacggcgcaaaatttttctcgcgccgtgcttttcgtctatataaatgttatttgattgccttctccagcgcctgcttgatgtcatcgaggatgtcttccgggttttcgatgcctacggagaggcggataagatccggggagacgccggcttcctttaattgctcgtcggtcatctggcggtgcgtggtgctggccgggtgcagcacgcaggtgcgcaggtctgcgacgtgcgtgacgacggaggcaagctccaagctgtccataaagcgggtggccgcttccctgccgcccttgatgccgaaggaaatgacgccgcaggtgccgtgcggcatatatttcatagcgagctcgtggtacgggctgctctcaagacccggatagttgacccacgccacgcggtcgtcctgctcgaggaattcggcaatcttctgcgcgttcgagcaatggcgctccatgcgcagtgcgagcgtttccatgccgaggttgaggtaaaatgcgttcatcggggcagcctgtgctccaatgtcacgcatcaggtggcagcgcgcttttgcgatatacgccgccttaccgaagtgctcggcatacacgatgccgtgataagattcatccggctctgtgaactccgggaacttgccgttgttccaatcgaaattaccgctgtctacaatggcgccgccgagctgcaccgcgtgaccgtcgaggtactttgtggtggagtgcgtgacgatgtctacgccgaactcgaacggacggcagttgataggcgtcgggaacgtgttatcgacgatgcacggtacgccgtgcgcgtgtgcggcgtttgcaaacatttcgaggtctgtcacgacgagagacgggttcgtaagcgtttccgcaaacacgcagcgggtgttctcgcggaatgcggcgttcagctcgtcctctgtgcagttcggcgaaacgaatgtgcagtcgatgcccatttcatgcagggttttgtagaacaggttgaatgtgccgccgtatacggcgctggagcacacaacatgacctcctgcgtggcagatgttcagaacggccatcatggtggctgcctggccggaggacgtgacgagcgcgcctacgccgccctcgagtgccgcaagcttcttttccacagcgtcgagcgtcgggttgccgaggcgcgtatagaaaaagccgtccgcttttaaatcgaacagatcgcccatttctttggagctgtcataggtgtatgtggtgctttgtacgatgggcagaacgcgcggttcaccgtttccgggcgtatagcccgcgtggatacacgttgtatccggtctgtactgtttcatttggacttccccaatctttaataatatcctattttcgcggcagtgcttactttgtgaaaaacgcttttaagagatttgcgatgaaatccgagccgagcacgaccaaaatgacgattgccatgaacgcgatgacggaaagcgactggatgagcatacgcttgccgcggggcatatcgtcctcttcggacggtttttcctgcgactgctcttcccgctctttgagcatcagctctttggcgcgttcgaggtcttggtattccacgtaaatatccttatcggtcggcagatactccgggtcgtacacgctggtggaaaagccactttttacggggtgtatcgcatggcgcaccgcgttttgctcaaagagcaatgcgagctccgcagcttccccctcgctgaccttgaggaaaaacacttcgtcctcgggctttacgggccgcagaccgcggctgcgcttgcagttcggacaggtttgtgtggaatcctcgcagatgcttttgcatttcgtgcagtagagcataatagcctcccatttcggcattgccgtttctgcttttcagtatagcacagcttttttacaaattcaactgcctttcgcggcgcacttcatcgcaaaacaggctgcaactgttctccacgcacggcgtttgcaagcgtttcgggaattaggtcgaaatgtgcgacgagagaattcggcttttttatggggtcgtcctgtccgaggggcacaaaatagatgtttttcgtgttcataagcagaccaatgtttttgcacgacgcaccgagagcatcgtttgtggcgagggacagtacaacgggcatggagacgcgcagggcggattttaccgccatcgtgacggctgtatccgttacggcatttgcaatcttcgcagcggtgtttcccgtgcacggcgcgacgagcacggcatcggcaagacgcttcgggccgatgggttccgcttctgcgatggtgtggataatttttcgtccgcagatattttctatacgctcgtgaaagctttccgccgtgccgaagcgtgtatcggtcgtgtacgccgtttcgctcatcacgggcaacatatcccagtcctttcgcagcagagcaagctgcgcgagagctttttcaaatgtgcagaacgatccgcacatggcaaaggcaagcgtgggcatgtcgatcactactcctccaaaatattgtagaccgcctctttgatatactccgccgccgtcttcggcgcgacgcggccgggcagcgagggcgcgtcgatgacatgcaggtgcaattcttccgcacgcttcaaatcgatgccgccgggtgcggaggcgagctcgatgatgagcgtatcgcgcgtttgctgcatgagcacaggcgaagtcaaaacctttgcgggcacagtgttgaaaatgagatcgaaccttctgctgatctcgcggtacgtcagcggctgcacgccgaacgcgcgcatttgcatgagatcggcctttttgcgcgctgcgcagaatacctctgcacccataccgcgcaggataatcgccagatttttcccaatgcgcccgaaccccgtgatgagacattttgcgccgtttatcgtgccggggtattcgcgaatcgcaatgccgaccgcgccctctgccgttgggatcgcgttgccgacggcaagctcttcgcggcggtagtagtcttcgggctcaatctcacgccacagggaagacgaggcggtcaaccgctgaagcatgccgccgcacaccgttttgtgcataaaaagacgcgcaaaatcgtcatctaaacgaatttcgttttcggcatacggcgcgtttaaaaacagaccgtcctttgttacgggcagcggcaaaaggatgacggagcttttcgccgcgaactgcggcaggtcgcattccgctgtgccgcggcaggtgccgagcatttctaaaccgcagacacacacggggtaaccgtccgctgcaatggactgcgccaaatatttcatgcgctcatcgccgccgatgacgccgaatgtattgatcatgggcatatttccccccacctttcaaattatcatccgcttcattttatggaaacgagcggcttttgtgcgccctgaaagacttttttatacttttttgaatttgctatttatttttctgcccgttggcggtataatgtatgtgtatgggtatgcgatttcggacgcatagctatgtttttgagatataacacagtgtattacataatttcagataatttcgcaaaacaagttttgcgtgaagccaattcagaaaggactctttcgttatgacgaatcagaataatacgaccgataaaaacgttaacctgctcgataccgtacgtcgtctgcactttgtaggcatcggcggttccggtatgtgccctatggcggagattttacaccacaaggattatatcatcaccggcagcgacatcaatgaatccgacacgctcgcgcgcattcgcagctacggcatcccggtgcacatgggtcaccgcgcggagaacatcggcgatgcggaggtcgtggtgtacacggcggctgcaaagcaggataacccggagcttgttgcggcgcgtgcaaagggcattccgacgttggagcgctccgtgatgctcggccttttgacgaaaaagtttgcaaaccccattgcggtttccggcacgcacggcaaaacgacgacgaccggcatgctcacgcagatcttgattgaagccggacgtgacccgagcgccgtcatcggcggcaagctgccgttcatcaacggcaacggcagagtcggcaaaagtgcggacattgtttgcgaagcgtgtgaatatgtcgatacgttcctgcagctccaccccgccatcagcatcatcacaaatatcgatgccgatcatctcgactatttcggcacgctcgataatattgtgaagtcgttccatcagttctgcttacagacctcaaagcgcatcatcgtcaatgcagataacgccaacgccatgcgcgccgtagagggcgttacgaatgcggagatcgtcacatttggcagaacggataaaagcgattactacgtgacggagctcaacgaagaagatacggtctgcgaagactttaccgttatgtataagggcgagcgcgtttgccgcgtgagcctgcgcgtgccgggtgagcacaacatgatgaacgctttggcggctgccgctgcggcacatggcatgggtgtggacggcgagcacatcaaaaaggcgcttgaggacttctccggcgtacaccgccgctttgagattttaggcaaatttgaaggtgtgaccgttgccgacgactttgcgcaccacccgacagagctttccgctgtgctttccgctgccgtgcgcatgggctaccatgaggtttgggcggtgttccagccacacacttattcccgcactgcaatgctgctggatgattttgcaaaggcgctttccatcccccaacatgttgtgatgacggaaattctcgccgtgcgcgagacgaacacgtataacattcacacaagcgaccttgcggcgaagattcccggcagctgctggtttggcagctttgaggagattgcggattatgtgatgacgcacgctaaggaaaacgacctcattttaacgcttggcggcggcgacatttacaagtgcgcaaatctcatcgtagaaaaatacaaagagagagcataaatttctaaaaggctttccgcgcgaaagctttttcttttggaggtaccatgtcttttcgcgccattttctttgacattgacggcactttgctcgggcgggataaacgtatgccgccttcgacgctgcatgcactaaaaaaggcgcgtgaaaatggcgttttgttattcgttgcaacgggtcgtgtgacgccaatgacgtatttcctgcgtgattattttgattttgacggctttgccgcgatgacggggcaatattgcttcgataaaaacggcaaggttttacatacgctggcgatcgacccggaagacattcggcttttgatgcagctgcaaaaggaggagcctttcccctgcctgatcgccgaggggcgcgagtgctttgccgcaactccggcgaaacagattgaagatcactttttgcggcataatcttccctccccgcccgtttacgatatatcgcgtgcagattgtcacgaagtgtatcagcttatggtatacgacccggaaatttatttgccgcgtattttgccgctgaagcatgtacgtatcacacatgctgtcggttactgctatgatattcttccgcaaaacggcggtaagcaaatcggcattccggcgatggcggcgcattacgggataagaaacgatgaaattctcgtgttcggcgacggcccgaacgacgtggacatgctgcgcgatgtcggcttcggtgttgcgatgggcaacggttgtgcaaaagccaaagcggctgcaaattatgtgacaacggatgtggacaacgacggcatttaccacgccttgaaagagctcggcgttatttaaactataaacagaaagccccgcaaaaccgattggttcggtaattgcggggcttttgctatgcggaaaattttatcgtttgtatttcggtgcggcggcgcggagcgtgtgccaaaggagcgcagcggcaatgatggcggcgcttacggcagcgccgatggaaaggcttttgtagccgagcggccctgtgaccatggagacgagcacggcaatggcggcgatgcacagcaaaatgatatatgcggctttatccatatgctcaagtacatttttgttcatgttcataaaagcatctccttaatcggcaagctgattgacaacagcggcaaactccggcagcgtgagtgcttcggcgcgggaatttgcccgaaccccggcttgctcaaatgcgtctgtcacttgctgcttcgacatatgcagtgtgttggaaatggaattgacggctgttttgcggcgctgtgcgaacgcggcgcgaataacgcggaagaaaagtgcttcatcgtgcacatccacaggcggttcttttcgaatacgcaactgaatgacagcggaatccacattcggtgcgggcataaagctgccgcggctgacctcgaacaaaatttccggctcggcataatactgcacggccgcactgacagcgccgcactcgcgcgtgccgggctgtgcacacaaacgctctgccgcttctttttgtaccataaccgtgatgctcgtgatgggcaaacgatcttccaaaagcttcatgatgaccggcgacgtgatgtaatacggcaggttcgcacacacagcgacctcttccccgttaaattcttcttcgatgacgcggtgcaggtcaatcttcatcacgtcgtcgttgatgatcttcacgttatcgcagtcggcaagtgtttcgtctaaaacgggcaacaggcgcttatcaagctcgatggtgacgactttttttgagacctgcgaaagctcgtaggtcaaaacgccgatgccggggccgacctcaatggcgcctgcgcagtctgccgcgccgctcatcccagccatgcgcgggcagacggagggattgatgagaaagttctgaccgagcgccttggaaaagctgaagccgttcttttccatgacggctcgaatggtggatatatcggaaagtctttgcatagggatatcctttcgattaaaatgtcactttatagatctgcacgccgttttcgtcaaagacacacgggaacagcgcttcgatctccgcttcgttcacgttgaagttattgcgctcgtaagcggagaccagaatgtaatcaatgctgtatttttcaaaaagcgcacagtttgcctgcggtgcggagaacatactttgcatgtccgtttcgcgctcggtgtaatcgagcccgtgaaaatacacgtagcttgtggagccgcagacgatgtttctgcccgtcagcgccgcgatctcgttgttatggcgcatatcggtcagcacggtgtcttccggctcggtgttctcataaatgtactccgctgctttgagctgactgtcgccgtataagcaatagcccgcaatgctctctctgccgatggtcagcaccgcagaaagcatgcatagcacgagcgcgccgacagccaatgcgcggcggcccggcagtgtgcgcaggcggcggtaaatctcgaccatatacgaagcgactacgccgcagacgagaaaatatgcggcgtaaagcagcttgttgttatcataggtattcggctggaacacgacaaactcgcaaatgaaccaaatgacggctgcgggagcgcagaccgtgaaccggcgctgatctgccgtgaaaaatgcagacaggaataacagcgccgtgacgccgagattcacaagatagaaccacaaatagccgtcctgcaaattgccccagttgtaccacccacgcatgaagctgtctccgctcgcctgcgagaatgtccacgtgaaaagctgcggtgcggcaagcagcagtgtgatgagcaggaatacgccccacgtttttacaagctgtatgccgaaacccttgcggatcgccatgatgagcagtgcaagcacaaacaaaacgaacgctgcggcacaaaccaaaaccagatacagaaacacggatgattcgcgcgagatgagcttcggcgtgacgaactgcgcgccgaacgcgagcaacatcaaaacgagtgcagcgacttttgcggtaaactgaacatgagcactgctgccccggaacactctgcggcacagtgcaaagcaaagccacacgccgcaaatgagtccgaacgcgagaaacgaatgcgtatgaatcatgacaagtccgcctgcaaaaataccggcaatgatgaaataccgttcgcagtgctcataaacggcgcggtacagcacgtataaaagcgggaataaaaccgcccagccgaacagcgttgcgcgctgcgggatgagcatatccacaatgacgttcacccagcggatattttgatcgacaagattcgtgggcgtctcataaaacgatgtgaaaatgcgggtaaaattatctgttccattttgcagattcgggaagaaatacgcaaagccgaagccgccgtttaaaaaaaacaaaatctccgctaacgcggtcttcgctttatcacgcagccagcgttgccagaaaagatgtgcgccgaaaaacacctgcgccccggcaaaaagcatcggcagcacatacgcaaagcgcagcggcgcaccgagcaaatataggcttgaagaaatgctatccgacaagaacggatacgaaagcttcacacccggcaaaatggaatacatgggcggaaatgtcttctgatccgcgatactcgtgatgaatccgaggtgcatgctcatgtcgccgtaagtgcattggctcgaccagatctcgccgttttggtaacggaagctgtgcagcaccaaaaacacgaacagcagccacaagccgagcggcaaaagcagtgtgcgttctgcacggcagaaggctttgtgtttgccgggaaaatcattcggaagcagcttcggacgctttaagaacacagcgccaaccgtcagcaaaagcagtgagatgagcgccaaaacatgcgctgtgatgctgaacgaaaacaggaatgcccacaacgacggcagccacattaaaagcacgctgcccgcggcgctgccgagaatcatttgtgtatatcgccgctctttatttaaaaagcatgcggcaagtgttacgccgcacagctgaaacatcagaaaatacagcagcgccaccgcgccgcccaaaaaattgccgcccataaacagctcctgaatttgttctttaatataatatattgtaccattttggcgacgggatgtaaagacggcagaaaaggttttattgcaggcgcttacgcgctttttcacaaaacacccggaaacggggttgaagttcaaaatgcaatgtgctacaatatattttaataattacggtgtctcccctgcggttttgcgcaaaagcgaacgatgatacgcagtcgtatatgtgtagtttccgattgcggagtgcctgaatgcaaagtgaggtgttcttcgtggagaatgatatccatcggagagataaaacgaactactatctggatctggctgaggccgtttcccagcgctgcacatgccttcgacgtcactacggcgctgtgatcgtaaaaaatgatgaagtgatctccaccggctatgtcggtgcgccgcgcggcagaaaaaactgcacggatatcggcaaatgcgtgcgcgtggaaagaaatattccccgcggtgaacgctatgagctgtgccgtagcgtacatgcggaagcaaacgccatcatcagcgccccgcgcgataagatgatcgacgccacgctgtatcttgtcggcaaggaggtctctaccggcgactatgtgaaaaacgccgtatgttgctccatgtgcaagcgcatggtcatcaacgcaggcattgcacgggtcatcgtgcgcgatgaccacgatcggttcagagagatagatgttcaggattggatcataaacgacgaatccatcgaaggtgtattcggctattgagccttaccccgttaccgcgtatccggcataaggctcggaaagaatacggtgaacatttatgtctttaatacaggtgtcaaacctgaccttcggctatgaaggcagctttgataacgtctttgaaaacgcgtctttttccatggatacaaactggcggtgcggctttatcgggcgcaacggcagaggcaaaacgacgtttttaaacctgctgctcggaaaatacgcgtacagcggcaccatttccgcttcggtcaactttgagtatttcccgtttgaggtggaaaatccggacgatacgccgcttgagattgcggagagcatcatgccggattttgagatgtggcggctaacgcgtgagttcaacttactcgacgccgacccgggactgctttaccgcccctactcgacgttaagctacggcgaacgtacgaaggtactgctgtcgattttatttatccgcgaaaacagctttctgctcatcgacgagccgacgaaccacctcgatattgaagcgcgcgacacactggctcagtatttgaagtcgaaaaaagggttcatccttgtcagccacgaccgtgcgtttctggacgaagtcatcgaccatgtgctttccatcaaccgcgcggacatcacggtgatgcgcggcaactttacgacgtggcaacaggagaagaaccgcgaggatcaatttgagttacaacaaaatgagaaactcaaaaaggatgtgaagcggctggaggcggctgcccgccgcagcgcggaatggtcaaaccgtgcggaagaccgcaagatcggtttcaaaccggagcgcacggaaaaggcccttgaccgtcgcgcctacgagggtgaaaaaagccgtaagatgatgaagcgtgcaaagagcattgaatcacgccgcaacgatgcgctggaggaaaaaagcgcgctgctgaaaaacattgaatcggccgatacgaaattgcagattgcgacgctgcgccacccgaaagatcttttggtagaggcaaacgacctttctattgattacggtgacggccccatctttcctccgctgcgctttgagatccgccgcggcgaccgtgcggcattgcagggcaaaaacggctgcggtaaatcgagcatcataaagctattgtgcggcgaagatgttccccataccggcacgctgaaaaccgcaagcgggcttgtggtctcgtatatcccgcaaagcgcggagggactttccggcacactgcgcgactatgcagagcattgcggcattgacgaaagcctttttaaatcgatcttgcgcaagctggaatttcagcgcacacagtttgaaaagcgcatggaggatttttccgagggacaaaagaaaaaagtgctccttgcgcggagcctctgcgaaaaggcacatttgcttgtgtgggacgaaccgctgaacttcatcgatgttatttcccgcatgcagcttgaaacgctcttaaaagagtgtgtgcccacagtcattttcgtggagcacgaccgccgctttgtggaaaatgtggcaacaaagatcattcggttataattgcgggttaaaatctgaacaaagcgcgtcgtgcagggctgcggcgcgcttttgttataaaaatcaggggctatgaaagagagaaatctatgaagcaaagaagcgactatattggcatattgaacggcatacgcgcgtattccattttgatcgttgccgggtttcatttgtggcagcaatcctggctgcaaaatctgtttccaagcaatttgctgcagtttatgggtgtgcggaatttcagcttaaactgggtgccgcgcacgggctacatgtttgtagatgtgatgctgctgctttcgggattctgcctctttttgccctatgcgcggcaaatgaccgacccgcttgcgccggagccggataacctgcgcacattctttaaaaagcgtgcagcgcgcattttgccatcgtattatttgtgcttgcttctctacctcattttctgggtgcggccttcggattacgcgaatatcaagcaatacttgcaggatatttttgcgcatctgacgtttacgcagacgttttggccggaaagctacatcggcacaaaatttccgacagcactgtggacactcggcgtggaaatgcagttctatctcgtcttccctttgctcgcgcgcgtgttccgtcgctttccgcttatgtgttgggcggtgctttccgttttggcgcaggtgtatatcgtgctttttgcacatctgccgcaaggcaacgcagaaagcctgcgcatcaaccagttcccggcgtttttggatgtatatgcaaacggtatgctgtgtgcgctcttcttctgccgcctgcggatatggcgtgagcgcgaatggaagaaaaaccgtattttaccgcttgcggcgctgatgctgcttctgttcagtggtgctgccattgtgtgtatgttaaatgacgggctgagccgtgcggcaatcatccagcgctggcaggtggattaccgctttctgttttctgcgatggtctgcgttttcattttgcttttggatgctgcaccgaaaggcgtgcaatggctgttttcaaaccgcatagctgcttttttgtcgacggtctcctataatttctatatctggcacagcacggtgcttttaaagctgaaagcgtggcgcattccacattacccggatgccccggagggcgctgccgcgtggccgcaatccgcaggcggcgagccgtggcactttgcttggcaggtgaagtacacggtgctgttttgggcgtgtgcgctccttttggcggcgtttttcacctatcttatcgaaaaaccgacagcaaaacagctgctcagaaagaagaaaatcacccgtacatagaaacagaccgccacggcgtatttcacgcattcggcggtctgtcttcatattctgtccgggttacggaaaactattccgttttgccgtcttctttctggccgtaagcgcggtcggcggcttctcttgcaatatcgatgacgctgtattcgcgcttttcgccctgttcgatgataggcagcatttggtagacctctgccgccatgccgtgcccccaaagcatagggtcgatacgcatggagtagccgtggccgttttcgcacatccagtcggtcattttggcgcgcggcaagccgtaagccgctaagatcgtcatgatgacgccgccgtgtgtgacgagcacggcactctcatctcccgtcatcatcatgtttttaacgagcatctcaaagcccgcacagacacgctgcataaatacgatgctgctttcgccgttcggcggggcctcgtgctggccgccgttcatccaggcgacgaacttcgggtcgtttttcaattcttcggcctttttattttcccaatcaccgaagtcgcactcggcaagctctaaaataacttccgggtcggcggtgggatataagaccttcagcgtatcgacacagcgcacgcacgggctggcgtagtacttttttgcttcgggataaatgcccttacgtttcagctccaaaagcgcctgaatgccctcctgcgcaagcggagactgcgtgcggccgatgtaacgaccctccaaattgccctcacatataccgtggcggattaaatgaatggtgtaagatttcatgcgattttcctttccgggacggtaaaacggtgccgttgtccctttcaccaaaaattcgcgggaaaacccgcaaaaaaggttcgtttatctgtttacttctcggataatttcgtttataatttacagagtgttattttttgactcaggtggtgaaacttttgtgaacagtgattttccgcgcattctgacactgctgcgcaaggaacaggggatcagccagaaaaaggctgccgcagaccttggcatctcgcaggcgctgctctctcattacgaaaaaggcatacgtgaatgcggtttggacttcattgtgcgcacggcagattattacggggtctcctgtgattatctgctgggcaaaacaccgcaccggcagggcgaaaagctgcatgtgccggaaacggaggaggaagacacgcacgatggtctccccaacgtgagccgaaaaataatatcgaactccttacatattgtatttggtattctgaaaaaaatcaatagcaaatctttaacaaaagagatcacgctgtatttgagcggcgctgtgtataacgcgttccgcatgctgtatacggcgaacccgaaaaatccctcggctctttttgagacgaaggacggactgagtgaggcgctgaccgacggccgtatgcagctggcgcgtgccaaaagccgcgtgatgctgctcggcgaaaaagcgccggacgacgaggccgttaaaaaagacgacctgccacagctttccggtgagatgctctcggcggaatatcccgattgggcgccctcgctttttgcattgattgagaataccgaaaacgaacacaaggaaaactaagtaaaccaactgcaaaaaggaggcaaactgtatgtgtggttttgtaggttatattgacggcggcgaaacacagcttatggagcccgtgctgcacgctatggcagaccgcatccgtcaccgcggcccggacgacgccgactattacatggacggcgagatctcgctcggtttccgcagactttccatcattgacctcgagggcggcagacagccgattttgaatgaagataaaagcaaggttctcatgtttaacggcgagatttataactatcagtctctccgcgaagaccttttaaaggcaggccatgtattcacaacgaaaacggacagcgaagtgctgctgcacggctttgaagaatatggcaccgacctgctcaataagctgcgcggcatgttcgcgttcatcatttgggacaagaacacgaaaacgctgttcggcgcgcgcgattgctttggcattaagccgttttactatgcaaagatgcagggcacgttgatgttcggcagcgagatcaagagctttgtggaacacccgcactttaagcgcgagctgaatgaacgcgcactggagggctacctttctttccagtattctccgggctacgagacattcttcaagaacgtttacaagctgccgcctgcacattatttcttctacaaagacggcaaaatggatatgcagcgctactggatcccggaattcaacgcggaagaagacaagccgcttgaatattgggtagacgagattgaaaagacctttgacgactccgtgaacgcacacaagattgcggacgtcgaagtcggctctttcctttcctccggcgtggattccagctatgtggcctgctctgccgatgtggacaagacgtttacggtcggctttgacaacggcgaaaaatacaacgagatcagctacgcaaaggagctttccgagctgattccggtgaagaattacagcaagacgattaccccggaagagttctggggcaacttcggcaagattcagtaccatatggacgagccgcttgccgacccgtccgccgtggcactctatttcgtgtgcaacacggcttccaaatatttgaaggtcgtgatgtccggcgagggcgccgatgaaattttcggcggctacaacatttataaagaaccgctcgccgtaccggcttatgataagatcccgttccccatccgtcgctttatcggcaaagtcgcttcgcacctgccgaagaaatccggcatcaacttccttatccgccgcggcaaaaagctcgaagatcgcttcatcggcaacgcgtacatgttcactgaggaagaacgcaagaagctcctgaaaattaagaccgatgcaccgtccccggcagaagtcgtaaagccgttctatgatcgcgtaaaggacaaagacccggtaacgaaaatgcagttcgttgaccttaacgcctggatggtcggcgatattcttctgaaagcggataaaatgagcatggcaaattcccttgaagtgcgcgtgccgttccttgataagaagattatggagcttgcggagcgcatcccgctcaagtaccgtgtaaacgacgagaacacgaagtttgcgatgcgcaaggccgctttgcgccgcatgcccgaaaagtgggccggcaaaaagaagctcggcttccccgtgccgacgcgtgtgtggctcaaggaagacaagtactacaacatcgtaaaggagaagttcacgggcgaagtggcacagaaatacttcaacaccgacatgctcgtaaaactgctggacgaccacaaaaacggcaaggcggacaacagccgccgcgtttggacggtctacacgttcctcgtgtggtacgaccagttctttaacgatgatattctcaacggctatgcggagcacacagacacaaagaccgcgtgagtatttggaaggaaaatgaagattatgaatacagaagcattaaaaagacaagattttctgccggttctgctcggcagtgacatcaacgtatacggcatggcgcgttctttccacgaggcttacgggtacaaaagcgtagcggtcggcaagggcatcctccccgcctgcacgcacagccacattgtggaagttttaaaggtagaaccgcgccttgaagaagacgacgtgtttgtcagcacgctgacggaatttgcaaagaacttctccgggcagagattactgcttgtcccctgcggcgacaactacatcaaaatgcttgtgcgcaaccagacgaagctgcgcggcatttatgaattcgagtgcatcagcgaagagcttttaatgcgtctttccatcaaggaaagtttttatcaggtctgcgaggagcatggcttctcgttcccgaagacaacgacctgcacgtatgaaaaccacaagaatcttgagctgcctttcgacttcccggtcatcatcaagccctcgaacagcgtggcatactggaactgcaagttcccgcacaaaaagaaggttttcgttgcaaacacccgtgaggaatttgatgcgattttggacgccatctacggttcctcttacaaagatcacctcattttgcaggaattcatcccgggtgacgattctaaaatgcgcgtgatgaactgctactgcggcaaggataagaaagtaaagctcattgcactcggtaatgccgtgctcgaggagcattccccggagggcatcggcagctatgcggccatcatcaacggctacgacgaaaagctgaacgagacgatgaagaacttccttgagggcatcggttacgtgggctttgcaaacttcgatatgaagtacgacgagcgtgacggcaaatataagctcttcgagatgaacctgcgtcagggccgcagcagctatttcgtaacggctgcgggctacaacatcgcaaagtggcttgcggacgacgtcatctacaacaagcccatggatctcaccattgcgacaaataaagtgctgtacacaatcatcccgacgaagatcatctttgactattgcccggacaccgccgtgaaagcggaagcgaaaaagctcatcgacgaaggtaaagtggttaactcgtattattacaagaaagaccgcagcctgatgcgctggctgatgttccgccgcaaccagcacaactactttgaaaagtataagcgttatttcaacaacaaaggactgcgtgactgatgaacagtttaggcgttatcggcggactcggccccatggcgacagcgtatttattagagcttatcaccgacatgaccgatgcccgcaccgatcaggagcatcttgacgcgatcatattcaatcgcccaagtgtgccggatcggaccgcatacattttagaccatacaaagccctcccctgtgccgccgatgatcgacatcgcacagaaattggaggcgctgggtgtgtgcgcactcgctaccccgtgcgtgacggcacacagctttcacgatgaactgcaaagtagcgtacacattccgtttatccacatggtgcgcgaaacggcagcatatctaaaagaagccggctgcaaaaagcccggcattatggcgacaaccggcacggtgcacatgggcttatttcagaccgcgctgaccgatgcgggtctttcctacgttttgccgaacgacgaaatgcagcagaacgtaatgtcgctcatttacgactgcgtgaaagcaggtgaaccggcggatatggtaaaattccgcgccgtttccgacgccttgcgcgcggacggctgcgacgctattattttaggctgcacggagctctccatcatcaagcgcgataacgagcttgggcccggttatctcgatgcgctggaagtgttggcacgcgcgtgcattttagcgtgcggcaaaaaacttaagccgaaatattcttccctgatccaacaataaaagcataaggaggcgttttgtatgtgcggctttgccggttatattcacaactacggaacgttcgataaagaagaagtcatccataaaatggccgaccgcatcaagcaccgcggcccggatgatgcccattattacattgacgacggcattgccctcggtttccgccgcctttccatcatcgatctcgagggcggcaggcagccgatcttaaacgaagacggctcgcttgtgctgctctttaacggcgaaatttacaactatcaggagcttcgcgaagagctcatcaaagccggacacgtcttcaccacaaagacagacagcgaaacgattctgcacggatacgaggaatacggcaaaaaaatccttgaccgtctgcgcggcatgtttgctttcatcatttggaacaagaacacaaaagagctctttggtgcacgcgatattttcggcatcaagccgttctattactacaaaaagggcaaggaattcatgttcggcagcgagatcaaaagctttctctctcacccgaattttgaaaaagagctcgacgaggatatgatcccgttgtacctttcctacgagtacagcccggacgagcgcacaatttttaaaaatgtcttcaagctgcccggcgcacactgcttcacctacaaaaatggcgaactgaaagtggagcgttactataagatcgaatacaagattgaagatgacaaatcgcttgaatactgggaggacgccatcacaaaggagttcacggagtccgtctccatgcaccagatcgccgatgttgaggtcggctgcttcctctcctccggcgtggattccagctatgttgtgaaagaaatctccaagggcacgaagaaggtcaagacattctccgtcggctacgaggaggaaaaatacagcgagctgccgtatgcgcaggacttctctaatgtcatcggcgtaccgaacatcgcgaataaggtttccgcagatgagttcttcgacgcggtgccggagattcagtattacatggacgagccgctgccgaacccctcggagatcccgctctacttcctcgccaaaaatgcccgccgctatgtgaaggtcgtgctttccggcgaaggtgcggacgagctgttcggcggctacccgatgtatcttgcaggcggacactttgaccactattcgcataaggtaccgcgcccggtgcgtaaagtcctcggcacggtcgcaaagcactgcccgaacttcaagggcaaaaacttccttgtgcgcggcgccatggagccgtatcagcgctttatgcgcgcaaactacgttttccagagcgcagagcgccaaaaattcttgaagcgtcccatcgcgagcaaggttccggaggaatacagcaagcgctatttcaacgaagtatcgaatctcgacgagccgactcagcttcagtatgtggacatgcacacgtggatgatctatgacatcctactgaaagccgaccgcatgagtatggcaaactcccttgagctgcgcgtgccgttcctcgataaaaagatgctggagctttccacacgcattccttcccgctaccgtgcagcaaacgaaacgacgaagatcgccctgcgcggcgcggccatcaagcagctgccggagcgtaccgcgaacaaaaagaagctcggcttccctgttccgctgaacgattggctgcgtgaggataagtactacaacaaggtcaaggcggcgttccagagcgatattgcggagaaattcttcgtgacaagcgagctgatgaagctgctcgacgaccacaagagcggcaaggcgctgaacatgcagaagatctggtcgttctatacgtttatcctttggtatgagcagttctttgtgctgaactgaatatagtcgaaaacagcgtcaaattacagattggcgctgtttctttatggacttattctgttttgttaacaacagacaagcaaatttaaaagaaaaacaaaagctttattcttcccttttgggggcggaataaggatttttcttttgcagctttatcgtcttgcacggcggtacgcggccggtgtttcgccggtgatgcgtttaaactggcggatgaaatggtatgggtctgcatatccgctgcgctcggcaacttccgtgatgggcaagtcactgccggagagcaataaagactgtgcataacgaatacgcgcttcaatcaggtcgcgcatgggcgatgtaccaaaaaccgcgcggtataacgcatgcaggtgcgaagcgctgacagacgcaagcgatgccatttgcggtacagtccagtgcttttccggatcagaaagcaccgtgtgacgcaggttctgcatcttttccctatctgcacggctgaccgtaggcgagtagttttcttccgctatggcgcgggagaaacgcacaagaaattctgtggtgtatgcttccaacaagtcctcccgaaacggttcattggagaaaaatgcagcttctgtttttcggaaaaggccggagataaactctgccgtgcgtgggtaaagcagtgtattttcgggaatacgatagcgcaaaagctgcacgcgaaagccaggcgcaaaatgcgcccagttgtgcgtgaggttactgtctgagtgaaaccactgtggttcatccggcgcatagaaaatacacgcgccgggtcttactgtgaccttttccctgttaatttcgatctctacgctgttcataaagtgcaaaaacgtgtagatttcaatgcctgttgggcgcacaagtgtaaacccggctttttccggccaatcgtggcgaatatctgtaatctccattttgacgccccctttgctttatattatacgcaaaagctcctcgtgtcgcaatagaataagtcaatttttgtgcatgatacgacattgtattttgcatagtgattgcgtacaatgaaaccgtaatcaaaaaagcgcggcaaaaattgggatttgccgtcttttcggggaaaggatgtacgaaaaatgagtaatataccgaggaaagaatatccgcgcccgcagtttgtgcgcgaaaactggatgaacctgaacggcacatgggcgtttgagatcgataacggccgcagcggtgaggcgcgcggcttacagaaggtcggcacagcgctcagtggggagatcatcgtgccgttctgcccggaaagcgaactttccggtgtgcagcacacggatttcatgtacggcgtttggtataagcgcactgtaacggtcacagaaaaacagctgaagggccgcgccgtgctgcatttcggcgctgtggattattgcgcaaaagtttttgtgaacggcgagcttgccggcacacataagggcggctatgtttcgtttgagtttgacgtgaccgcacttttaaaagcgggcgaaaatgaaattgccgtctacgccgaagataatacgcgcgaccgcctcatcccgagcggcaagcagagcgagcaatataactcatacggctgcttctacacgcgcaccacgggcatttggcagaccgtatggctggagttcaccccgaaggcttatatttcccgcgtgcagtattatccgaacatcaccgcaggcacggtaacggtgactgcagagctggtcggtacagcaaacctaacggtgacaacttcgtttaaaggcaaagagatgggcagctacacagcagaaaccgcctgcggcacgcacacattcgcgataaagctgagcgaaaagcatctgtgggatgtcggctgcggcaatctgtatgacgttgcattcgctttcggcgaagataacgtcacgagttatttcggtctgcgcgaagtgcgcctggacggccacaagttccgcatcaacggccgctctgttttccagcgtctggtgctcgatcaaggcttctatccggatggcatctacactgcgccgagcgacgaagcgcttgaaaacgacattaagctctcccttgccgtcggtttcaacggtgccagactgcatgagaagatttttgaagagcgtttcctctaccatgcagaccgcttaggctacatcgtttggggcgaattcccgaactggggtctcgattcctcctatgccgattccgtttacggcattttgccggagtggacggaagagatccgccgcgattttaaccatccggctattgtcggctggtgtccgtacaacgagacatgggatactgacggcaggaaacagtttgacgacgcactcgacatcgtttacagagcaacgaaagcgcttgaccctacccgtccgtgcattgatacgagcggcaactatcatgtggcaactgatattttctgcgtgcacgattacgaacagaacccggagatctttaaggagcactatgacaagctgatgaccgagggcacactgtttgacaaccacgcgcaccgccagacctacaagggcgaagcgacgttcgtcagcgaatacggcggcattcagtggagtcaggacgagagcggttggggctacggcaccggtccgaagaccgaagaggaattcctcacgcggtttaagggccttacagacgcactgcttgataacagtgaaatgttcggtctttgctacacgcagctgaccgatgtggagcaggaacagaacggcctttacacctatcagagaaagccgaagtttgatcccgcgtttttccacggcgttttgagtcgcaaagccgcaatcgaagactaacagatgcgtttggtgcccgcagtttttccgctgcgggcacttttttatcaaaatacaggaaattcgtcgattttcgtcatacgtacgtcacaaatgcatagtattttatataatagagtaattttgggcagcaagtttctgctgccggatactgttctgaggagtgtatttatgccgcaaaatcactttagagaaccgaaaaatcgacgtgaacatcttctctcttccctaccaatcgtcttgccggtggcagccgtgacgatatccgccgccgcgtttggtctgctgttcctgcaaggggatctagtggagagcgcggaggaaaccgttacatacactgcagcgattggcgcagatgacgagcaggtggaaatgtacgtctacgatgcgggcaacgatgaagttgaggaagccgaagaagaagcttcggaaatgaatgccgcgtcttcctatgccgcgaaagagcgcattttgccggctggcgaagtagaagacactgcagagcttgtagatgcatacagctctgtgccattatttgtttccagcggcaatcttgcggagcaaggcgtgcagacacggcttgaactgcttgaagattattttccaaacggcatgtactggaaccatatcggtgtggacacaagcgaaatgacggcagacgaaattgccatgtgcgttacagacacgccgtgcaaccattctgtttatggttatggaaactgcaacatttataatggactgatggatgatttcttcccgcaatacggagacgagacgcaatgcctcggctacgcttccatcatcagcgacctgctgttcggctacgatgcaccgatcacggagttttacgactttgacgagttgcgcatcggcgatcacatccgcatgggttggtatgagcactcgatgatcgtgacggacatcgactgggataccgataccatcaccgtgacggaagtaaatgcagattacgaaaactgccagatctcctggggtcgacagatcacccgcagcgagcttctcggcatggaaggcgaccttacctattacacgcgctacgcaaattgaaaatcggttgttctgcgcctcggcaagattttgatgtcttgtcggggcacattttatattttccaaaagttatacgatacaaaaacaccccgaacgacgcaaaatcgttcggggtgtgctgattcagagaatcaattatttaaccatgttggcaacttcgcttgcgaaatcgtcgtttctcttctcgaggccttcgcccttctcgaagcgaacgaaatccgtaaccttcatcgtgccgccggccttctttgcttcctcagcaatgtactgctcaacggagaggtcgccgttcttaacgaacgcctgctgcaggaggcagttgttctcatagaacttgccgattctgccggtaaccatcttctcgatgatgttctgcggcttcttggagttcttcggatcgttctggatctgagccatgaggatttctttttccttatcgagtgcttcagccggaaccgtggacttatcgagataagccggattcagagcggcaatctgcattgcgacgtccttgccgcactcgttgagaacttctgccggaacattctcagtctcaaaacgaacgaggacgccgattctgccgccgccgtgtacgtaagcaacgcagtcgccctcgtaacggacgaagcgacggatcttgatgttctcgccgatggtgagaatcttatccttcagcatagcatcaacagtcatatcggagccgtgtgccttagctgcaaggagagcttcaacgtctgccgggttctcatagataacagtctcggcacaggtcttaacgaaatcgatgaactgagcattcttcgcaacgaagtcggtctcagcgttgacttcgatcacaacgccaaccttaccgcactcgctgaccatagcgtatgcaacaccctcagctgcaatacggcttgccttcttaacggaagctgcaagacccttctcgcggagaatctcggttgccttctctacatcgccctcagcctctgtgagagcctttttgcaatccatcatgccgcagcctgtcttagcgcgcagatctgcaacgtccttagctgtgaaattcatttcaaatcaccattccttgtagaatcttaaactctatatcaaacgaaaggaatttttaaccgaaattaaattattcctcggtctcagcagcagcgcccatacggccctcgcggccttcgatgatagcgttagccatagcacctgcgatgagcttaacagcgcggatagcgtcgtcgttgcccgggataacgtagtcaatctcgtccggatcgcagttggtatctacgattgcaacgatcggaataccgagcttcttagcttcggaaacagcgattctttcctttctcgggtcaacaatgaacagtgcgcccgggaactccttcatttccttgatgccgccaagatacttttcaagcttttcaatctcgagctcgagcttgctgacttccttcttcgggagcagctcgaaagtgccgtcttcctgcatcttgcgcagctgtgcaagtctctggattctgcggcggatggtcgtgaagttggtgagcatgccgcccagccaacgagcgtttacatagtaagcgcctgcgcggagagcctcttccttaacggactcctgagcctgcttcttcgtgcctacgaagagaacgctcttgccttccatggaaaggtcacggacgaagttgtaagcctcttcgagcttcttaacggtcttctgcaggtcgatgatgtagataccgtttctctccgtgaagatgtactgtgccatcttcgggttccatcttcttgtctggtgaccgaagtgaacaccggcctccagaagctgcttcattgatacgactgccatttgaaaatacctccttggtttttcctccgccgggctgatattttcggggaaaaccgctttcgcggcaccaatccgagagcctcggcgtgcgtttttgcttgcagaatctgcaaatcgctgaactattatagcacaacatgccgggtaaagcaagtgttttctatccgttttcaaagaaattttgtaagaagctgcgcttcggtgtccgctttacgggaatgtgatcgaccagcacagcatcctccccaatggtcttcacagcgctccatgggatcacacagtcattctctctgccaaacaatccgaaaaaacgcggacggccgtacaccacgatcgccgtcagtgccgcctgctgtgtatcaaattcaatatcaccgagatacccgatgcgcgagccatccaaaacactgataacctctcgcccatgcatttctccgatgcgttctaacatatcgctcccccgtttcgccgtatttttccgatacagcgtatgcacagtagggatacattatgcgtttgcatcctttaaaatgacttcggcaatcgtttcggcggcaaggttcgagcccgcttcgttcggatggctgccgtcgtcgttgaaaagattttcggtttcggttttttcataaaatgcactgccgacatcggcgagcagcgtgtggtttttctctgccgcttctgcataggcttcgtgcattttgcggtacatctcatcgtaatctatgccgaatttttgaagctgtttgccgtctttttggtatgcccatgtcgcatacagaaccggtacggcaccgttttcacgaattttaccgcacaaatctttcacgctctgcataaagctttcccttgctgtgatagggccgttgctcatctcctgcaaaacgacgtaatcccatttttcattttgcagcagctccaatgcttttgcgccgagccttgtttcagggttcagctgctcacgtaagcgtgcaccgccgcgtgtgttctgtaccacttcggcacccgtgatttccgccagcatactcggcagatcatttgtgaaaatatagctgtttccaagcattaaaatgcgcatatttatttctcctcctacaataataattaaggtttaaggcgcggccgccagccgcgtctttttccatctcaaagccgaagctgttagaataagagggtaatggcctgacccctttcacctcatttttatttccatcacaaactatataccgcactccaaatacgccgtgtgaacttctggagttcggtccacacggcataatcattatttcagcttttcgagaatctcatctgccgtcataccggatgccagcagctttttcagcacagcttcggcttcaaccttcttagcagcttcggcagccttcgcctcaacggcagcctttttggcctctagctttgcgatttctttctcggtctgcttgatctctgccttctgcggctttagactttcacgcagggacttgatgtcggttttcagttcttcgatctgggcgacagtcttggaaagactctcttcgagcattgccttgtttttctgcaactttgcgatctgtgcatcgaagtcggtagatgcggtaacacggttcttgctgcctttggttctgggcataggatgatacctccgataagtttatgtaagatttagggttagtatagtgctgtgggaacaagtgagtattactttccgttattgctctgcaatcatgtgaacaagtctagctattgtttggtagtcttcttccttttttataacgaactgtcttaccagcaactgttcgatatttccaattgaaatccctagtgaagtcgcaatacggaacagtttttccttactatctctagtaccattgaggattgggaattcatgccgcccacaaatagaacgcagatagtcctcatcataaactatatcctcaggtatcaccttcggcaagaaaccgacattacttctataaaaaagcaaatacttttctatttgatctttttcctgttcctcatttaaacgtccctcatccggattagaatccagcccccaatccattgttgaacttcgcattccaacaattctctggaaacagtctctataataagaaattgttttatcacgttccaataccaagtcaaagtctggaaccagctcattaaactggtcaccatcgaagagaatgtattgactctttatatttgttcttgcaaaagttagaattgtgtacttttttaggtttgaacatccaccgggatagaattcaaccgaaataatactatcgagtccctcttctttaagaactttttccacaatgcttttcgccatctcgtcttcaacgataatacgttttcgatttagaattggacctcctatttctaaaaaagccaattctggaatcacattctgctgaacatatgttttgctttcattttttcttaaacatataacagcctccttcggcagcatttccacaatatgttccgagtgagtcgtcacaatcatctgaatatgttttcgcttcattgcatcgaagaagtattctacaagcctatattgtgcccttggatgaagggatacttctggctcatcaatcaaaacaatactattgttttgtgccttttcaacttctcgcactattgttgcaactagaaattcaccgcttcctgaattgtattcacagaagttactttcgttttgaaaaagaatatttgttgcccatgttccactaaagaacctgtgtcgtattatttcaactgattgaaagcatgagtcgagaatttgattaactgctgcaagttcatttctcgttaaggaataccttagctttttatttccttcttgtggttgctgttgtatcttgtgggcttgcctttgcacatagtccacttgatcttcacgattcgcagattttactatattgtcatataaaaagcttttttcaattccaccaacaaaagactttgtttgaattgatgttattgaaacgttctgtggaagagccccttctaagctccattttcttggcctttctgtgtgctgatatgcaaattcttgaccatcaacaatataatcaaaccttgcatttgcaaaaccgccatcatcaatctcaatctcaaaaaactcacactgcggctcataattcggtttcagtaactttatagcccgtgtgactgtagttttcccgcttccattctgacccacaagaactgctagtggaaaaataaagttgaactcagctttttctttaaacctcttgcaatttgttattgacagttttgacagccgacaatgaataatgcctctctcaaacatatccttaacgacatcaatgtcactcatatcttgacttcctgtctcacagattctgatacgattactattattctctgcaccttagccacagcacctacgctgtgttgcctaccgcccaccgcgtagaggtgtgcaaagtttcgagcggcaaagctgggagcatccataacgaatgactctcacagctcaaatatatactatataggtctcgttttcaaggataacgaagaaaattagacatgtatacttccttatgctctattttttaagctcatttttctgctcaaccacgtccaggccaccagcacaccgatccatccacccatcgtattaccgaacatatcatcgaactccgcgatgccaagtcccgtaatatactgggtcgtttcgattgccacagacatcacgaagggaatcagcaacacccaccttttctgaaaccacctatacagctccgtcccaagcggaatgaacagccagatgttgttgatgaccccaactctcacagattgctctttcaagaacttccctgcgtaggaaaatagaacaaagtttgttcttgcatcccccgactcccgaaacatcagtgtttcataaagaatgaaaaccacataggaaatcgtcagaaatatgcttaatctcctcggtagaataagtatcagcaaacagacaatgcagccaaaaacaactaccatgcatgggaagccattcagaaggttgtccacacacagcataatgttgccgtttttgtcaagcagaagattcaccttgccactgcgtttgatgccgtactgccctttagacaatgcctttggattgccattcgcatcaaaatacatatccgtatctgctgttccatctctatgataggtacgtttgaggatagtatagcctgcattggtaggggtgggtttgccatctgcaccaagataggtgatctgaccgatatatccttgctcgttgtgctggtataactcgccatactgaccaagcaaagacctcgctgggttcccatctgtgtcaaaatactgctcaccgacaacggtttcattaccatcacgctgatatgtcttaatcgcatatccagatgatgtactcgctgcatgaccgtctttatctagaaatgtcaaactagtgttctggccttcagtattaaactcacgatgagtcccatagtatccaccggagcactgtacctgctgtctgttcaaatcgtagtagaaatcatcggaagccctgccaccaacctgcgttcttacaataatagaatatccgtcactgagtattatcggattaccttcggcatcaagatatgtgattaccgtactcgtttcatcatattcatatgataacccgtaataatcgtcatatcttgccactgggtctccgtttgcatcaaggtaacgttcctctacaactcggccgctatcatcacgcattctacacacggtcgcatagcccatatcaatggcatctgtgattaccccatcaggattcacatagtttgtgctggtcacgcttccatctacggtttctcggacactcagctctgaggaagtgtatcctgcatcgtggtcaacatctgcatctggcaacaacgccaagatagacagaagaactacagatgcagtcagcaggattccgtatcctcgtttcaggtttgcactcaaactccgtagcctctgctcttgatagtctccacaacctgagacacatacttctggcaggtatcgtggtcggaagcctccaccatcacacgcacgaccggttcagtgccagactcgcgcaccagaatacgaccggtatccctcagtgcttctgcaacggccttgactgctgcctgcactgcttcatcatcctgtgcagctttcttatcggtcacacggacattctccagcacctgcgggtagattttcaggggctcagccagcttgctcatgggcagctttttggccagcatgacttccatcatcttcagactggtcaggataccatcgccagtgctggcgtacttgctgaagataatgtgaccactctgctcaccgccgatacggcagccgttcttggccatatactcatagacgtacttgtcgcccacagcggtcttggcgtagccgatgcccttttcatcaaaagccttatacaggccaaagttggacatgaccgtggtaacgacggtattggtcagcagtttgccacgctccttcatgtagcagccgtagatgtacaggatgtggtcgccagtgatgacattacccttttcatccacacacaggcaacggtcagcatcgccatcataggcgaaaccgatgtccagccccttctccaccacgaacttctgcaggccctcgatgtgggtggaacctgcattgctgttgatgttcagaccatttggctgtgcattgatgacataggtatctgcgcccagagcatcgaacacagacttagcgatattccaggaactaccgttggcgcagtccagaccgaccttgacacccttaaaggagtagataccgaggctgatcagatagcccatgtagcggttgcggcctgccacatagtccacagtgcagccaatgtgctcacggtgagcaaagggcagtttctgccagtccttatcaaagacatgaagtttgccatcaatatagtcctccaccagcagcagggtctcctcgggcatcttctcaccatagcagtcgatcagcttgatgccgttatcgtagtagggattatggctggcagagatcataatgccacagtcaaagtcatccacgcgggcgatgtaagccacagaaggggtagtagtgacatggagcaggtaggcatctgcaccagaagcggtcagacctgcgaccaggctgtactcgaacatataagagctacggcgggtatccttgccaatgacgatacgggcaggctcgttgttgccgttacgctcgcgcagtgcgttataataccagccgaggaagcgaccgaccttgtaggcatggtcggctgttaatgtaattccggcttcaccacggaagccatcggttccaaaatactttcccattatagttttttcccttatccaaagagtgatttaacaaaattatatgctttagccggattataatccgttgcctactgctcaccacggagaggtagcatatttgagcagcacagccatgctgatgcatggcttaatattttttataatgttttagtcccaattgatgtactcagctcggccgcaacatcagtaacagattacttttttacgaaaaatcgaataactgcctcaataacagttcccgttgcctcaccaatataaaatccaagtttctcaaaaaaagaagtcaaaaaactcctcaaagagctttctcttaaatcaactcgttgtcttttggctttttgttgattttcaatttcttgaacacatattttgcaagcataaagtaactgtacaatgctgtcctcgatttcttttgaatggaattcatttccacaactacagaaataagtggtatcccaaatattccactgctttgcgcatttaggacatcttatggtttctttttcagggtcaaactcaagttttcccccacagcccctatgatacccttgtgttgacgattttccgcattttttacatttagggaatggcattggaatgtacattgtagtttcccctttattgtccgaagcattttattgtttctttctatctttgtacctgtagctattttgtcttgatttttcgatacccgctttgaatccttttccaaagctatagccgatatctaacggtatttctttaaggttgctaataatatatcccatcttctcagcaataatctctatggtccgacacagccaatcacgaaatgactcttcgctaagttcatttcgcttttttattgtctccgaacgatttagaacttcatctaatagttgctggatttccggagattctactgtaacttctttctttacagaatccgacatcgttttaccctcttatttttttacttgattcataataaattgtttatactgaggatcaataaattcagtgaaatctgcaacgtccgcaactttatcaagcacccatctccgttccttgggtaccgcttcaatcatgttcgtcattaaaacgtctagccgatatcttctttttgcagaatatgtcacgattgttccttcccatttaggtaaaactctcttaactttttccaaaatatatttttcaaattcagttatatttcccatttgctccttactcggcatattgattgtggtattccatgcgctttcaccaggtgctgtaatatctgctttatttactgcaaatatcaatttgttaacaaaaccgttgccaaattctttatccaatgtctttattgcctgttgcattggtgtcatcgctcgatctcccgcattaaatgtccaaaccacaacatcaactaacggaagaattctattgtatatttccatattctttatatccgcatcaatgtcttcacctaatccaggcatatcatatacaattacttttcctttagcacctgtatattcctctatgtttccatatattttcgcttcttctttcgtgcatgctttaacatcgctaatttcccgtccagcattgaacagtgcattgattgtcgatgattttccaacacctgtaaagccaatcaaagcaattttaggaggttcaacatcttcaaccgcttttctaagctttttttccatctcaaatatttgagtcaagctcattcctgctttttgcaacgtcggtttaatttctccaaaaattctaccgaaagattcattatcaaacatctttctgtcctcctttttgcttttgtaatcgtatgaaatagttcaacttcaaatgggcggacatcctatttacttatttagcatcacctctaactctatcttatcatactactattttcgatttaacagtgatttgtatcttccaatttccagaaaccatatggttccatattatacaccgcaaatgatgtctcgacaaattccttaaaaaatcacatgcgatgttccgcttttagccggatagaaatccgttgcctgccatccgccacgtagaggcagcatatctggacggcgtagccatgctttgagcatggcttagtcataatcacgcaaagaactggtcttccagcatcaggcacagacaatgatagataggcagatgtaattcctgaatcatataggtttccgtctgcggagccttgatgcacacatcgctcatctccttcagtttactatcctttgctcccgtcagtccgatgaccttcattcccttagcatgtgcggttgtcgccgcaaacagtacatttttgctattgccactggtggaaatgccaaggaatacatccccggatttaccgtatccattgacctgctgtgcaaagcaaagcagcggttcgcagtcattcatataagccgtagacagggcaggatggccatccagcgcaatagcaggaagcgccccctgcaggttttctgctaggacagcaccgagttcctgattttccgcaaccagcttttcagcgaaatcagtttcaggcttacggggcagcttgaagcccttcatcagctcaccaacaatatgctccgcatctgctgcagaaccaccattgccagccacaagaagcttgccaccgttctcataggactcctccagcaaaaggtatgcggcaacaatatcattcttcgccgattctaaagaagggtatcgttctaccaacaagtcgatatgtctcatcaatcggttatccagttcacgcatagtagtactcctcctcttatttcaggtactgttctacaaagtccttcaaagacgataccgtcacagtttgtccgcaggactcagagccaatcaaagcagtctgacatccggcattctgacccgccttgatatcattttccccatcgccaatcatccaagactgcgacagatcaatgttaaaatcccgtgctgcattcagcagcattccaggtttcggtttgcggcaatcacagtcaaacttcagttctgggcgctccccttcatatcccttatgcggatggtgtgggcagaagtagatggcatccagatatgcgccttctttgcctagaagtgtctccattttgttgtgaatctcttcgagttcttcaaaggacacttcaccacgggcaatcacaggctgattcgtaacaacaattgccagataaccggaggcgttgatcattttgattgcatctgcaacgccgtccatcaactcaaactcggctatgttccgtaggaaacccacatatttattgatagtgccgtctcgatcaagaaacaccgctttctgcttgttcttcagattcttaccggaaacacgaccagtcttgtaatcctcgcatacagagtaatagcgttcaggcgtacccatgtccttcacatactcaggactatcgtagcagaacatcttcccggttccagccaacggcttaagaagctgccgatccaggtcaactttgatgggcttcccgttctctcccacagtgccaaccttgtccgcatcaatcccagaatgatctaaaatggttggattgataacatgaagtccagcattgacacggttgcgataatattccggccgttcatcttccttagccagccattgctcaacagccccatttttatcagcaataatgagtccgctatcgtagggatggctatttggatgcgtgaaaagagtaaccaacccgccatgctgtttatgaaaagctacgaaccgattgaaatccacatcgaacacagcatccgcattcagcagcagaaaatccgaatccagcttgtccttgattttgaaaagtgcaccgacattacccaagggttccttctcaaaatagtattcaatatgaacaccgaaaggctttcctgttgccggagatatacccgaaccatctccgaaatagtccatgatgatgtttccgagatgagaaacggtcaaaataatgtctttgaatccttggtcacgcagacactccaactcatgttccagaacaggctttccttcgatttttatcatcggcttggggatgtcactggcaacagaggagatccgggtgcccctgccgcctgccataattactgttttcatctcagaccatcctcactcgaatgtagtttttaggctcataagtttctggcgtataatgaataactctcgtaccaccgtcttcaaactcaaacggaatatacatcaaatcccgcattgcccaacgaacagcatcctgatgctccggctgcacatagaacacgaggaatcctccgccaccagcaccgagcagttttccacccagtgcgccggcagccataccttttgcgtacagttcatcaatgctattggtcgaaacagccgaaccggtttgacgtttcagtttccaagtgtgatcaagcattctaccaaaatcatcgagatcagtgttcttgtccgtcaaaacacgttccgcatcatcaacgagcgcaagcatttccttaagttgagcagtcttatcctgcttacctacagcgtttgctttctgaacatcggaagagaaacgagtaaagcccgtaaagaacatcatcagattcttattaagctgctttttgcgttccggcgaaatgataacaggcagtacttcgtagccatctgcactgaagttgatgcggttgaaaccaccaaaagaagccgcaatctgatcttgccagccacctgcctcctggcacaggttgcgctcaaggtaaatcgcttcgtccgccaactttttcttgtccgcatatttgcctttgagtgcgtaaaatgcgttcaacattccaacagcgaaggaactggatgttcccaaaccagaacgagccggaagatctgcttcatatgtaagacgaatctcatgcatatccagcattttcatcgcatttcgaatcgccggatgctgaatatcatcgatgtttgtcacgcgctctgtctttgagtaggaaagctctgtagaataatcaaagaaacgcggaaggtgacgaacattcacatagcagtatttgtcgaatgtggtggaaagtacagctccaccgtgctctttaaaaaagttctccatatcggtaccgccaccaaagaatgacatacggaatggtgtttttgtgataatcatcagtacttcctccacaccatcttattaactacgtttacatacccctgaataatgcgaaccaccttcatggacacggtctcgtccacataatcagggcagggcttgcccaggacacccttctgcttcatctcaatcgccatatcggtagcgttgagcagttcccgggtggtaatgccagccagaatgaagtcgccggcttccagtgcctcgggacgttccgtactggtacggatacacacggcggcgatgggatgaccaatggacagatagaaactgctctcctcgggcaaggtaccggagtcggagacgattgccagagcgttcatttgcagcttgttgtagtcgttgaagcccagcggctcattgactcggacacgagaatccagctggaaaccgctcttttccagacggtgcttgcttctgggatggcaggagtacagaatgggcatatcatacttctctgccagcgcgttgatggcggtgaacaggctcaggaagttcttttcagaatcgatgttctcctcacggtgggcagacagcagaatgtacttgttcttctccagtcccagacactccagcacgtcgcttttctggatcttctccagattcatgtgcaggacttccgccatgggagagccggtctggtaggtacgctccttgggcagacccgtatccgccaggtacttccgggcgaattcggaatagcacatattcacgtcggagatcacatccacgatacggcgattggtctcctcgggcaggcactcgtccttgcagcggttgcctgcctccatgtgaaacagcgggatgtgcagccgcttcgcagagatggcagacaggcaggagttggtatcgcccagcaccagatagccctccggctgcaattcgctgagcagctcatagctacgccccagaatgttaccgcaggtcacgccgagattctcgcccaccacgggcaccagaatgtcaggaccatactccccgaaggtgtttttaagctcaaaatcctcccagaaaatggtggaaaggtttctgtcccagttctgattgtaatagaccacgcagcagtcaaagtattcacggcagcgcttgataacggcagccagccgaatgatttccggacgggtgccacagccaatcatgactttggtgcgcccgtcgtttttccatgtaaaattgtgttccataaaattctcctaacgtcaaccagtatcttctcttataccggctcgaaaaaggtgtccgggtggttcgggttaaagatctcgttacaggtcatcaccgtcacaagattctccgtttccgacagattgatgatgttgtgggtccagccgggaatcatgtagacagcctcgatcttgtccccggaaacctcaaactccaccgtttcgccggtgttgatgtttcgctcctgaatcaaaccgtgaccagcgaccacaatgaacagttcccacttggagttgtgccagtgctgccccttggtgatgcccggacggctgatgttgatgctcacctgcccacagtcagcggtatgaaccaattccgtgaaagagccacggttgtctacgttcatcttcagagcatacttgaacttgtccgtcggcagataggtcaggtacagggaatacaacttcttagcaaaggaaccgtctggcatcttgggcatcataagcgtactcggctgcgccttgaactcctgcaacaggtcaacgatctcgcccagcgtgaccttgtgggtcacggggacgcagcagtaacgaccatctgcttgcaaaacagtctccgcaccgtcaaattcacagtgctgctccttgccttccagcaggtcgaacattccttctaccaggtcgtcaatgtacagcagctccagctcggtgctgcggtcattgacagtgaaaggctcatcgttggcaaccgcccagcagaaggtgctgacggcgctgttgtacttggggcggctatgtcccatcaggttcacgaaacggtagacggcaacctttgctccggtctcctgagcatattggaagaacagctcctcgcccgccttcttgctcctgccgtactcgctgttgccgaaacgaccagccagcgtcgcctgaatggatgaagacagcataatggtggccttgttattgtgctttttcaggcagttcagcaattcggatgcaaagccgaagttgcccttcatgaaatcttccgggttctccggacgattcacgcctgccagattgaacacgaagtctgctttctggcagtatttgtccagctcctccggtgtggaatccaaatcatattcgtagattcctttaatatccaatgccgggcgggttttgttcttgccgtcccggatgtttttcaggttgttgcacagggcggttcccaccatgcccttggcacctgtgactagaatgttcattctctcacctcttagtgtactgcggtgcagtccggaatatctgcgccatccggcacagttgcattattgcagatggtgcagttgctgccaatgcgggtaaagttgcccacagtggcaccggtgcgaatcacactgttggtatagatcaaggtacaatcccctaccgctgcatcacagtggacctctgttccggcattcagcaaaacaccgtcgccaacggacgcaccgttctggacacaggcattttgcaataccacacaaccgcatcccagcttggaatacggactgatgtaggcactgggtgcaacgatgttagggaacgcatagccaagggctttcgccttctcatacacctgtgcccggaaccgattgttgccgatacccaccaccagcaagctgtactccttccgcagctccggcaaatcagcaagactgccaaccaccgaaatgccacagatgtcagtgcccacaggttgcccatcgtctacaaaggcacagtcatattctatcatcgcttgttcagccaccatgcagccaaagccaccggcaccaaccatcaacagcttttccttagacattgggaatgcctttcagctcattctgaacatactcggtggtcaggatcttcttgacggtgccttccacatccagacggtttgtattgtggctggtgtaggattcatctgccatggtatgtacctcacccttaaccacaaacttgtcatagttcaggtcacggttgtcagcggcaacacggaagtaatgacccatatcctggctgcgcagacgctcctcacgggtcatcagggtctcgaacagcttctcgccgtgacgagtgccgatgatgttcgtaccggtatcaccaaacaactgctggactgcctttgccaaatcgccgatggtggaagcatcagacttctggatgaacaaatcaccaggatttgcatgttggaaagcgaacaagaccagatccacagcctcgtccagattcatcaggaagcgggtcatgttggggtcagtgatggtgatggggttaccagccttgatctggtcgatgaacagcggaatgacggagccacggctgcacatgacgttgccgtaacgggtgcagcagatggtcgtgccgccgcgctcagcagccacacgggcgttggcgtagatgacgtgctccatcatggccttggagatacccatggcgttgatggggtaagctgctttatcggtggataggcagacaacacgcttaacgcctgcgtcgatggcagcgtgcagcacattatcagtgccgatgatgttggtctgaacagcctgcatggggaagaactcacaggaagggacctgtttcaaagcggcagcgtggaagatgtaatcaacaccgggcattgcgtcacggatagactggggattgcggacatcaccgatgtagaacttgaccttcttggcgttctccgggtgcttggcctgaagctcatggcgcatatcatcctgcttcttttcatcacgggagaagatacgaatctccttcaggtcggaatccaggaagtgcttcagaacggtagaaccaaaagaaccagtaccaccagtaatcataagggttgcgttatcaaatgcagacatttttatttcctcctacttattctcttagaaataagcttaatctttgtaatgattctctcatacatcggaatcgtacaaaattttttcacagcctcggtgaatgtgctcttgctcaaaaattctacgaaatcatccctattagctggaagctttgaagagtgattcaacggaatgttttcgtatgccgctcgcatatcaacctcctgacatgctatttctgaccgggcctcattcaagagctctaaacccttagctgtatggcaaataactaaatccgttcctcgattatcatcgaaatcatttataaattcacttacgttccaaaaatccgcaagtgtgagatcactgtttctcctcacgcccttacttgggcaattataacaagagggtcgtaagcacatatccctcaagtaagctttcatcattggattctctaagaatgtactcatttcaactgttccgtttgcgccctcaatttttacagagtactttctccatcccaatgccttatctcgaaacgtaacatgctttacttctgaattcagtccttctttaactgaatctaggtacctcccccataccaacggagctggaacaccatggcaaataatatcttgcgttattaagttatcgtactctcttcctagataattcttgaagccatcaatttggcaaggagttcctgaaaaatagacttttcttccacttttcagaatctttttagcttctttaaatgtgttttctatcctactttgtacgtattttgagcctctaagtttttccaaaccatcaatggaatccaccataatatgatgaacttgaaaattgctatcaaaagccgcaccaaaaaccacaccaccatgtttcaaaactatctgtgctaagacagaaaacacaccaccagatgaactactgtttcttatttgttcatctttagaatacgcagctatagaaatctctgagaaatcctgaagaactggcttttgaactaccgggcaaacctcttcacattttttgcaatttatgcaaacatcccgatcaacttgaggatacctgaatccctcactgtcttcttccattgcaatgcattgcagtggacagcaactataacaggcatgacagccaacgcacttctctttatccagaatttgtatcatatattttcccaccacctcttgcaccgactatattacttaccctttagtacaagttcttttaagggtgtagtaatcaactctttctcatgcttattcatactgaacacccatgcattaatgcaataaactacactataaagaacaatccagcatgccagttgaataaaggaatgaaattcaacaaacatcattatcagtgttccaaatactattggtacaacaagccccttaaacattctcagaatgcttttccaaaaagaaatcacatctatattacacttcttctgataataaatattaatcaaaaatccatttgccaaaacaagtgaaatagccgttccaagggcactaccaattgctccccaccattgacagaagactatcgaaacaccaaagttaaccaaagccatcagcaaataaacaatcgatcgaaatttatgcttattttgtgcgcgttgaatctcaatgccgacattttgaatcaatggaactgtagcaggcagtgttagtaagagtacaacataatatgcatcatcataaccttctccggcccaaaacctaataaacggcattccaaagaaaactaagcccgatgaaaccaacgccaatatcaaaaactgaactcgcccaacccgagtgaacaactccgtgagctgctttctttgaacaatcagattagaatgcgtgtcatttatgattctgtgaacaagcggcgtaaaaacaccggaaatcgccgtagaaaccatactatagtaattattaagggtatatccaactgaataaactgcgacagccaccgttcctttataccgtgccaaaagaagtttatctatattccagtttatctgatcaacaacaatattgattgctataaaagaggtgtaagtaaatatttccctaaacagccctttcttaaagcctcgaaatacaaatcgttctttcaaatgtccaatcacaaagatcagatacattgtatctgtgaaaagagctaaaacaattgtgattgtaacaattgcaacagagcgataaccagcaaatagcagtggtattgtcagcaaaggactgcaaacagtttttacaattccaagaagttttaggaaaataaactgctcatgggcactgattatatcagcaaaaacactcattggaaacgaaattgccagattaattgtaagtaaaatcaagagctttcgagctaaagtatattcactagctgtcaatccatctttgaagacaatttccaaatgtcctgaaatatataatccgcaaatcaatgctatcataccaattacggaaaatatcaaaacaaacaggccatttaatttatagatgctatctgtatcctgctcttccttataccttgaataatagcgtatataactactattaaatccaagactcaaaacggacatcattgaaatagttgacgcaaccgtattatatagtccatactcactctgtcccaatattttaatcatataaggtgtatagatcaaactgactattacaccaagagccatttggacatatgagattatagagcctaattttctttgattcatcatttgacctcttctaagatcttatttatgttgcttaacaaatagctaatagaactcttacgcatcgtttcaaaagcagtaaactcttttgaataatctatcgaagcagtctcatatatatagtcaaatgtcgttctattcggaatattgcaataatgatcttgaacgctaaaaagttctgttaaggactcaattcttgatcccattgaggactggaagctgcgctcaaaaacatagaattgcctctcaaacaagagcgaaaaagccgttgcatgaaagctatctgtaaaaacaatttcagcgttttgaattagttgaacaaattcactaggtgaagcatttattattctttcatcgccgtagtcaaggtcatcttcactaatttccccgtttaaaaaaggcattactttcaacttcaggttcttgcattttgcatattcttttgcaatttttctttcagtagaatcattacccaaaaaatagcacaatgcatatcgctctgaatcgcatttactcccgactaatgacttccattcttcccttctcagtaaaaaaaccgggtcaacaacccactggatttcgacgggggtaataggtcttagcaactcaatcgcagatttttctctcacggatatcgcagcgtagtccttgaatgcctttttgtatcttccgctttcctctgcactcagtgtatctttggcaatgctagccgcataagacatttttttaattccctcaattccaaaatcgaggagatatgcatcgcatactgcatttggatgccatacttggtcgcttcccgtaatatacaattgatattcttttgcaagtctatttaatgaatcttgtgtaaatacttctttactatggcaaatcgctccatcacgaaatgctgcaaacttaacttcacgacctctaatttctttatacaatctcctatacttaattcttcttggtatcgacagtgtgtaacgataagctcttcccagtcgccgtttgatgctctcacctttgtctttatcaaactggatttgctcagcatcaaatccctggttttttaagaattgacacaacgcatacgattggagaacgcctccataatttttactgccatagtagtgggtaatgattcctatttgcttcatcagtaatcgaaaactccctcatacatattcaactaaatttatcttaattatcaagtaattgtttataaatctgatagtattggtgacacatcttctcttcgctatatttagtgattgcttctctggagatatcttccttttggagttttcgccctagcatctgtctaagagctctctctaaagcatcatcatcattttgattcacaaaatcactatactctttaagtgctatgctttcaggtcctcctgctttaaatcctacaacgggcgttccgcagcacaaactttctgcagtgaccatactaaatgtttcccttagactcgttaaaaggcaaacgtctgcgcttgaatacagttttgaaagcattttctgatcggacattcgccccaaaaacttaatgtttttcgggaaatccagaccagattttacttcactgcctacaacaataaaatcaacatccgagcatcgtttagccacttctataacatgctgaccgccttttatcttgtcgtaaaaattcggcgttacatgaattactagcggttttggtggaggagtcgtactatcgggtatataccgaaaaacagtcgtatccaaaccgttaaaaactgtttccacagggtatcccttaaaaaaaggagacattttagcacgatttgtaagccagtcagagacattgcatatgtagagtttttcaaatccttcatatgcttttttcataagattccattcatttgctgtgcggtcaaaaaaatatgtaattggatgttctgcgctcaatttatcacacgaaaagcaacctgttttccacttttcgcactcaactgcatgcgtgcaacctcctgtatacatgaactctgcatgatttgtaattacagtagggatatggttgttctttagatattccagtatcttatagatatttaccatatatccattaatgcaatggatgtgcacaatatcagggttaaccttttttataaaatgaattgcagcctttgttccccatatgcaaccgccgtatggataacccgttactcttgaacggaatgactgtgccttccgtactaatctaggtgtagttctaaactcatacggattggttgatttttctcctaatccatatatagcatatgtttcgtcgcccttatttcgcacataattttgaattgcatagacaattttacctgtacttcctgatttgagccagcaattcatttgcattactttcataagggttttcctttctagttaaaaaaagaatctatagttcattacatttagcgaatcatctttcagcaaaaagaagtacatcacaaaaaacactggcataacaactgttgcaactgtccttagctgatacaggtaaacatcatctctacaacgattattaattctactaattgccaccggaataaacagaataaaataataattaattctcgaaattgtggggttaagaggcgtaaacaagtgaataaatgttgccaacagtaaagtgtttcttagaccgatttcttcttttccagctttgttttcgtcaagaataacataggtgtatatagtaagaagaagaaaaagaatcattaaccctatttgtccggaactacctgtcaaatatgaatatttgtaggcatactcatcacctgctaattgaaaaatcaaattcattagcaaatctctgcgcatcatcacaaaccccatcagaggaataatcccccaaagccatttttttgttatgtgagcatgatatattgggtacaacagcaacagcatgattgccgatttatggaagcaataggctaacgctacaatcagtagatatttgattactttcttctctttagcaaaatagtaagctggaaccgccaaagcaatcgcaatactctgacgcatcccagaaaagaacatctcgaaaagcagcgagattagaaaaaaggatatgcaaatcattgatccctcagcttctcttttataaaggtacataaccggaaggacgactaagactgcgcaaattgacacaaatagccgtgagccaccaaaccactgaattatagtacgaagtactttaaatccaatttcatcacttccgtataggagtgccgctttccagccaagatatttagtatattcaaaagttcttatatacccacgggtatcaacacctaccgaataatctctcaagcagagaagaagaagatatccgataaaaaagaaagtaatcgtaatcttatcaactttattcttctcgtaatgtaaagctgtaaaaaacagatatacaaaaacggtaagcccaatcagtatcccgtagataatcatgcattattcctctttgagttaaactctcgaatagctctctcgaccactttttcgaatgtagctgtactactctcaatcgtgtggtgtgcttgagttatttcgacggctttttgatagaagttttcttgcagttcttcgttataaattagttctctgagtgattctttcaagctctttgggtcagtgcaaaccattgaagctcccgtttctttcatatagcccacaacgcccgcgtcgtccggtccataggtaaggactgctgctccactcgctaaaccgtctgatgcttttgttgataaggagtatttcgtcaaattaatatcctcgtccctgaatccctctgcaataacgaagatatcacattcggcggtcttgttttcgacctgactatatggaatcgatccaccgtaaaccacatttggagtattctttagtacaccacaaatttcctcatcattctcgttcgaatagacttccagtcgataattcggatcaatttcagataaagctatcgcaatatcccgcaatgccaaatttcgccccaaacgaatgcttccaaaataaacaactttgggatttttcgtatctataagtcggaactctctccgttccaaagaagaactaaaatacacagtctctccgtgaatgcagaaataatcgttatacaacttcttaatcttgtcgctacagtacactgcactactgttagatgaaagcactttttctgtcagctttttgaacctgctccgaaacaacttataaacaggtgattttgatttcgattcatcaaaataatagttatcaccaataatcgctacaataggaatctgatatcgattcgctacaaacaaagctatctgctgcgtaaatagatggttgctaaaattgtaaacaatacactctggcttaaagttatccaaccaagcaataaatttaggcgtacaccaaaactttttgcgccaaagtaatcctctaagtatctcaacgcttggtgagtgtttactgccaatcttatagctcagtccaactgctgaactatcctccattacttcgtttccatcctcgttacgcatctcatcgtaggtgtagatttttccgacctcaacaggcttgtggagccatttcttcagtagacttgcatctgtgatctgatacatctcaccacaatgacctttgttaggaatccaatttctgctaaagatctgcgccacacgatctttctcccaatagtgaaagtatgcatcaagtgtacggctgctatcgcttgtactatatggcgttgtggcaataatcaaaatctttggatgcatgaacttaatttctcctcttcgactctcaatcgactcatatactcataaaaactacctataaccttacacggaacccccgctgcaactgtttcacttggaatatccttattcacgagacttccggctccaataatgacattatcacctatcgtcacatcataaagaattcgtgaacctgcaccgatgaaaacattatttccaatatttatttctccttggcggatcttatagcgatgctctttatccatatagttaaacatcatgcaggtgatatcatggttaataaatgtaacgccactcgccacatggatattatctccaaagctgattaaatgtggctctgttccaaaattccacggttgcaaatatacatgttcaccaatactcttaaaatagtgtttcttcttcaggtactccgctcttgagtaccccccgaataaatatacaagcaagtcgtatatatctctgtattctattccacatatctagctccttttatacctccaatagctcgacgaaccgttccactgcaccgcttgttgcatactttttacaaccgtactgatatgcatattggctcatcacatcatactcatccaagcttagtttcgcagcatcttttaacttgtccgcaagcttcttattatctcccgccgtcacaagatatccactcttatctgcatccacctgctccgggattgcgccgacagcgaatgcaataacagggcgactatacttataagcatcgataataatgccggactgcgaagcagaattatatggaacaattacccagtcacagttaacaaatgcttctcgcatctctgcgtctgtgacgtagtcgttattcagctttacatttttctctttggcaagctgatccacaatgccctgcatctgcgaatccactcgtcctaccacatcaaattgaatgtttggacacagtctcacgatttcaagtaagttatcggcacccttgtatggattgattcttccaaagaagagtactcgaccactatgtactggtgtcgtatatgccggatatctacgccacaattccagatactttacacggtctgcgctgattccataacggtcaatcatatcctgaatataagttttattacgcagcacaattgtgtctgcaaacttgaccacagctttattcatcagattgaccatcttgacttggctgtcaccctcatgtggaataacctcatgaatcacttggtaagtcttagttttaccagccatcataataggaagattccatgtatgcaggctttcaaaataaatcgcatcaaaatgttccttgcggatacgatgaattatcgaaaccaacagtggaagattgaatgttttctttgttacaccaggcctttccgggcagtcaaccagccatgtatgatctgatttctggagttctaccttcggagtcttgatgcaaagcaagtaagcatcccagtcacttcgatttctcatttcttcgtacattccaaacaacgtatcctgatgatccgcattgtctgagaatgtcactagaagtacttttttcatctcgaattcctctccgcatattgtctaactttttggggtcacttcactccaagagtctgagccgtttattccttataaagttctactaatcgtcctcagcagtgtgagtcacactgccgctatgtcttgtaccgctacaatgaacgtttctgcgacaaattcacgttacggtaaccctttcctttattcccggttccactcatccatgccacggtagctcacttgcttatgccggattaccccacacgaatgagcatctctgcgaccatgtggttatcaccatcttgctcacatctgccttgttatctccaagaccgggatgaaatcgcagatgatgttatctcaccaagccctgaaaccgctgtgtgaaagtcaccacagtgtcgttaataccctcacggtgcaatcaggcataagctcacaagctaccgttacatctataaaagtgccttttcggggcataaaagcttcaattcacactcgttttgccctctctcacgcttggatcttcggcattttgcactactagatgcagtatttcatcctcatgtagggcaattcgcccgctttccagcttaacgctactgtaagagctgcatttatgcctgactccactctggaatttcctccaatttttagcagctcaaaatgtgcgaaatcgtcgatatttagtggttttctccactcatagcagtggtttgaccctcagaaactccctcggtgctttcaggcataaataggattccttaactacgaaactatataagatagctgctattcaatttcaaatttactttttcaactctcatccaagcttttaatggcaaccggacgagtttgaatcaaactgctacgtcatcatcattttcggatttcttttcagccgcgacagtgacttcgttttccgtcatagtagtcgcttgaccttctgcaacgccttccgttgattccggtaggaacaaaattttgacagtcgcgaacatgatcttaaagtcaacgataatactcggatgggctatatacatgagatccatcacgagcttatcgtatggcgtcgtgttatactttccgtagacctgtgcgtaaccggtaagaccggcctttgcttgtaatcgcagattaaactccggcatttcttcgcaatactgtgctgcaatctccggacgttcgggacgcgggccaacaatgctgaggtcacccttcaaaatattgatgagctgtggcagttcgtcaatgcggcaagcccggataattctaccaactggcgtgatacgatcatctttatcacccgtcgagagtcgcgcaacgccatctttttctgcgtctacacacatactgcggaatttgaaaatgttaaactcacgcccattttttgttaagcgaacctgcttataaaatacagggccatgatccgttgctttaattgcgatagccgtaacaagaagaatcgggctaagcacaataagtcccaatgcagacacaataatatcaataattctctttgcaagcaaatattcaggacttgccatataccgactaactgtaagcatcggcaaatgaaacatgtgcatatggcgtgcaccactcatgataacgtcaccgatacgcggaatcacaaacatattgatactgtgttcaatacaatacttcaagataatgttgcgatcatggctatgtataccgcttgcaaataccgtttcaatgccgtccaacacagaaagatcttttaggcaatcttcagcacagagcgtcagaacaacatcatatttaccatcaaggccatatttgccaatcagcttttcaaatccacgccgtacatcataaataatagctgttttttttgcgggaaatgttgcatagtaaccatgatgtgccaaacaagcccacaaaaatgcaagtatgatttgtccgacaagcgctgctattccaggcaagaggtttgttaaacctttacttagcagacaaataacaacatatataatgagatcactcacagcaactgccaaaaactgtgcgtaaacaatttcagaaatccgctgtatggacatcataaacgcgtcataaatacgtccaaaaataacaaatagaactaagaacagcaacacaacaattaaattacctttctgatcgaacgatgaagcggttcgatcagaatagtataaataccagcaaagtgcaaatggaattgtcatcaagaccgcatctacaagcttaatcagccgcaaaagcaaatcgtgtttgaacttggacatgaaacctctcctttattagttcaatattaaatccctcaattattctaaatatcactttttcactttttcatagaaaacattcatcacaagcgcctgcaaggcatcttcatcgggatagaattccatgtattcctgccctaccttggcttcaccgtctatggtgcggatctcagaaacatcgcttttactgagtaagtccgcgattttagaaagcttttcagctgtgcagtcggaagtaagataatcgctgacctgcagaatcgcattcgtagcgaaccacgcatcgctgtcggctttttcggttagcttcttttgcagtgctataaggtactggcgctggcgctccattctgcgcagattagagctatcctctagcccgccacgtgtgcgcacataagttagtgcatggttacccattaatgttacgttctcgccttgtacaagcgttgagtcaatggaggaaaaatcatccatcacttccacctcgacgccaccgaccagatcatttaaaattgccacaccatccattgtaatggagatgtagtggtcaataccaacgccatacagcagattggaaacagcctctgccgtgtttagacagctgtcccgctcacccgaaccgtatgtatgcgccaacgcaagctgaccggtaaatgtaccggccacatcgcctcgaacgcccaagatctgaatcttcgtcatcgtatcgcggttcagctggatcggcgtgcaagcgccggtctctttgttaatcacgagcagcatcagaaagtcggattgttcattatttaaatagttgctttcttctgtctccgcatatttatcgagacccatcagcagtacggtctcaagatcattgcggcgcgcataccacccgccgttataatacgtcagctcccgcgtatctccggcttcctcaagcgcagaggaactgcttccctctgcgtttgaggaaacatcaggggcagtatcctgtccctgattttcatccaaattccggagtaaaagagcggctgtcatcaaaagcatgaggacggataacccgattgccatgccttttaagacacgcatatttacccgcagcttcataaattagcccttacgcttcttagaagcaacaacagagccgatcacagctgcacatccgaggcccagagcagcaacacctgctacacgcagaacgccgttgtcactggtctgcggagaagacggagcattggtgctcggcgtcgttgtgtcagcagtttcctgcttgtctacaacaaaagcgaccggggagaagctgtcaaacgttacgtcgaccgtaccgtcagcattctgctttacgcgatccttcgggatgatctcccagttggagccctcatagttgtgcagaacgatcagcgttgcagactgggaaagacccagattgaagcgaacggtgatagggctactctctgctgcggcacccgtgacggaaacgtcgaacaggtcacgaacaacgagatcctcaacagaagcctcgctgccgatctccttcaggtaatcgccgatggacggtgcgatgtcggtgagcgttgcagcagccttaatctgctcgtaagcagccttcaagccgtctgcaatagccgcatcagcgctgtctacagcggaaaccggagttacaataacttcgccgtctgcaaacgcgttaccgtcggcatccgttgcggaaacaactgtcggtgcacccttctgctcaacgctaggggtaaagctagcagcaaaagacggcacagcaagagcaactaccagcaggattgccgataagattactacgattttcttcatggttaaaacttcctttcctaaatgggtgatcagacaccatttattattcgacctcatcgacgcattttgcaacgacgagaaatcgtctgtgtgaattgccctgcaggcaggtggacaggataagcaatttatcctctggggtaacgggcacatctgtactgtgctgcgcaccgatctcacgcacatcgaaaatgctgttcaaaaacgcattgtaacgacgcttgctcgtaaaatcatacgtgtacaaaatgtggcggttatcgtacggcacagctgcaaataccttgtagtgcatttccttttccggcagatacacggtgatatcgccgtgctccgtcagcgcattcgattcggaatagacctgctgcagcttgccgaacatcgtgccggcaagcatctgatgcccataaagcaccgtagcggggtcgtccatttttccgtcgttataagaactttcggaaaagattgcacccatggagttatcgtttccgtcgctgtcgtgcgtcaggtagtaatcatcgtcccccgcgcgctgcaagatcggaaaatcaaactccgtacccggaatgcgcagccaagcgtaaatatccgggttttctttctggagtgacgcaaagtcaatcggactcacatacggcactgcggaatctgtggatgcggaagataccgcttccggcgttgctgtcggtgtaaccgtagccgtggcttctggtgtggggtctgccgtttccggctgttttccgccgcgaagcagaaaaacaccgagcacaatgcaggtagcgcccagtatcgcgaccaaaatgatcagtgcgcgctgtttcacaggcgttccccctttcctgaaagatccggcaggtttcgttgaaattcgcgccacacatcgcgctcaacggacttttgaatcacttgtattgcttctccgagtctcggaggtcttgtagtcatgttgtggcagtcggagcccagcacatcaatctcgccgcgctgcagcatcttcactgcttttcgctttgtcctccagcttaaaaagaacaaagcgttgcattgcattttcacgccctgcgcccgtaacgcctgcaatgcgtcactgttgtgaaacggcaggtagcgctcaatgtgtgccaataacacctgtgtgtcccgtcggttttgaatctcggccacttcatcggccatgcggcggctccactttgcaaaaggcatttcaatcagcagtatgttcgtgttttgcagccatagcgcttccagttcatcaatacgactgacgccgtcaaagtaacaaacctctgcgccaagataaacacgcggcagatccggcgttaaagcttcctgcagccgcgcggcacaggcagcccgccgctccaaaaacttctgcgggctgtactgcgaagcgtaaaaatgcggcgttgcagcgatttcggtgatgccctgctctgcggaggaccgcaaaagcttcaggctctcctccacactgctgctgccgtcatccatcttcggcagaatatgggaatgaatatcgagcatgcgttatttctcttttccgtttccggtcttatttttctcaccgtagccgtagccatagttgtaatttttatagtattttttctttccctccaacgctgcgttcgtcatcacgaagcccaagatcttcgcttccgcaaagtgcagctggcgcacggtttctgcgactgaacggcgtgtagcgtaattctggcgcacaacaagcagcatgccgttcatgagcttcgatacaacgagcggatcggaaacagccgttacaggcggaagatccaacaggatataatcgaaatcacgactcagaacatccagtgtaatgcgcatctgctcggagccgagcagctcagacgggttcggcggtatatcgcctgcaggaattacccacatgttcttgtgcagttcgcagcggctgagcacatccgcgcccgtacactggcctgcaagcaggttggaaatacccttctttgtctgaatgtgcagacgctttgtgtacgtaggcatacgcatatccgcctcaatgacaagcacaagcttgccggcttccgcaatggaatacgcaaggttcagtgtggtggtgcttttgccctcgccgcgcacagaactcgtcattccgataattcggcatttctgctcatcggaaagcgcaaagtcaaggttcgtacgcagaagcttgtatgcttcggaagctgcaaagtttaggttttcaccgagcattgcgccgtactcgtagtcggaggctgcattcctatattttctcatgcgttttcctccttcccacctttgctgccatctctataatagtaatagttgcttttcgaattcttttctgtcagatccggcaccacagccagcagcggcaggtcaaacgtcacgcgtacgtaatcttcgttgtgcacaacatcgtccagaagatacagaacagtaaacacgccacagctcaacactaagccaagcattgcaccgagcatcgtgttcttagaaagactcggcgaagttttcttggacggcaccacagcgtaatcaacgatgcgcacggaactaccctctacgatgtctgcaatgcggttcggcagcagctctgcaatcgtgttcgcaatcttctccgcttcttccggactcgcgctcgtcacagagatggaaaagacctccgtggagttcacagcgccggcttcgatcataccggaaagctgctcgtaatcatacggcagatttgcttccttaatgacctcctccagtgtgccgcgggtcttcaaaataaccatgtaggtctcaacaaggctctgcgccgcggttaagtcactcaggttcacctgcgtacttccgacggaaatggaactgttgttcacatacatcatggcgctcgccgtataaagcggtgtgatgaagagctttgtgcccgcaaatgccatagcggctgtgataagcgtcacaagcacaatggcccatgctttgtgccacagggcttttgcaagctgcagcagatcaatctcagtttcgttttctctgttattacccacttgttttccccattccaaattttcttttttctgcacatctgcgaacaccctatatataaaaggaatacattcgttttcccatcaacgaagggaagaaaatcagttgcacaaatttatccttattctactatatttcgacgagaaaatcaagtgtatttccgctatacgtattaacatttatgtgcaaacatgcgacccccccccgatttttttggtaagtttgaccagcttgacaaagttcaacttaattttgtgtttttcggcattaactccctatattttgttccattactcaaattcatctatttactttattgaaattttaattctatattttttgccattaaaccatgtgtttcctgccgcgcgctgcattttcagattactgccttaatgtgtgtaattaatttgcatgtattttttaaaatactatccagcctcttaaaataagacgaatcaaagttgaaacaaaaatcacttctatttgccaaatatttgaatttcatttaaatcctgcgtgattatcattcacctaatattgctctttgaattcacaggcgcatctaagctttgcttttatatgcattttttataaagtttcaatactatgagataaagctaaatttctatgctccactttaaatccatcaaaaaaattcacccccctaaaaccagaaaaacgcgcagttcggtttttcatacggatatacccccaatactgggtgtccagtattagggggcatatcctaccaactgcgcctttttcacattcgtatattttgttttcaagaaatttctcggcgccgcttttatttatactgacggataaaataaaaaatcccaaacctctcatttctaagaagtttgggatctccgtgtggtgccggtggcgggggtcgaacccgcacgatgttgccatcaacggattttgagtccgtctcgtctgccaattccaacacaccggcttaacaaaatttattatacgttaaaccggtggaaaaagcaagtgtttttttaattatttcgaattttattcgtttgcgggcacagaaacgtcaaaataacggtacttagcttcgcagtccccctgcgccgtaaggcccacaaaacagcccgtaaacgtgcagttcatgcactctgtggaaagcagctgcgtgctgccggtgccgatctctttcatctcttccccggctttacccgcaaggaacgtatagcgcagacggttggccttgatgcacagcgtcagcgtgtccgtttccgggaagaacaccggctcgctctcgatcagcatatcaaccacgcggcggcgcagcgtgacatccataccaccgtttttacgctcggcaaacagctcatagtggtgctcgttcgtgtggaaaaccgtcatgcccgctttgccgtcaccggaaagcgtcatttcggtcgtatagttcaaaccaaactgctgttggcgcacaccgaagaatgtgaccgtcttcagctcgtcaagcgtcgcctcactgccgcgcagtgtaacgccgctcttatcaaatgtatacttcatgcggtcgagtgtgcgcagatagctccagcgcggtgcaggtgcagctgtgttgaaatcatcgtgccaactgcgcgcaacacgcacgtctccttcgccctctgccgtcatgatgggctgaatctccttgccaccgtatacgaccggccagccgttctcatcccatgtaaccggcgcaatcatcgtctcgcggccggtgtgatgcagcatgaaaacagacgggcgaatgccgtgaaacaccatccaccacttaccctccggcgtctctacaaggtcggcatgtccgagcgcctgaaactccacgcggtgtgcattgcggtgcgtgaggattgggttgtgcggacaagattcgaacgggccccacacgcttctactgcgcgcaatggtctccatgtggccgtactccgtaccgccctcggcaatcatcaagtaataccaattgccgatgcggtacatgtgcggtccctccgggcatttgccgccggtaccgtaccaaatgcactttgtctcgctcagctttgcaccggtctcaagatcaatctcaaactgtccgatgcagttgttgccgttttcgtccgtgtgtgtaccggtgtaatatactttgccgtccgcatcccagaacaaagatgggtcaatgccctgatggttgatccagatcgggtcggaccactcgccgcggatgtcatctgtccacacaaaaaaattgccgccgcctgtcacattcgtcgtgatcatatagaatcggccgtcgtggtagcggatcgtcggcgcaaaaataccgccggaagtgcggcagtctaccagcggcaactggctttcgcgcgtcaaaacatagccaaactgctcccaatgcagcaggtcacggctatgccaaagcggcacgcccggaaaaaactcaaacgagctgttgacaagataatagtcttcacctacgcggcaaatgctcggatccgggtaaaaacccggcaggattggattttcgtatgtcatgtgtacgcctccaaatttaaacgtttgggcatattgctcttgcttctttttcactatataatagtatatagtctgcgttgtcaaaaagcaatgcggataaaagaaaaacccggataacttccgttatccgggtactggcggagaggatgcgactcgaacgcacaatgccttgcggcacaccacatttccaatgtggctccttaccattagaatacctctccaagcgacggatattattatagcgcatgtctttcaaaaatgcaagtgttttttcaaaaaattttcattttatttccttttaggcaatattgtgcgaaatatttgcacatttatatattaaaactatatagcaggctgtgtctttttcattcgattgtatggctcacgtatattttatgtaaaattcggcgaaaacagggtgctttttcctctcgggtttgctataataaagtaaatatctcaagaattcttgcgggcccgctttcggcggcgctccgatttagttgctcaacattgaaaggcggtgctcatattgaataaaaaacttccgggcgggccggctgcggtcatcgagatcggctccagtgcggtgcgcatgcgtgtctcgcagttaaagcacggcgagatcgaaatgctggattctctcgaatatcctgtgttcttcggccacgaggtcttcaccacgggacgcatcagctttgaaagcctgcgccaactctcttctatcctcacaaaattcacaacggcgctggacggctacaactgcaaaaacgtgcgcgtggtctcctccaccgtgatgcgcgaggcggaaaaccgctcattcgtcatcgatcaactcaaaattcacaacaatctgcatttggaaattctggaatacagcgaagaaaaagcactcatctgctccgagattatccggcttttaaaagaagaaagcaagatcgagatgaaagacgcgctcatcgcgtatgtcggcacgggcagcatcggtgttgcgctgtacgacggcaaggcaatctgcacctcgcagaacatccccatcggctccttaaagctgcacgatgccctcggtgcgctcagccgcgagtgcgacgatttttatcccgcggtcgaagaatatctcgacatcattttaaaccgcgtcgatattccgaaaaaagacattcgcagcatcattttgacgggttccgatctggagcttgtcgcctccgtgtgcggcgccgaaaaaagcggcgacctttacaccatctccgcaaagaaaatgcacgcggcgtataaggaaatccgcatgatgtcccattctgccatcgcacgccgctacaacattcccgaggagcttgccgaaattctctacacagcgctttctatatataccggcatgctgcgcctttcggacggcgtgcagaaggtcatttgcccggatatcgatatttgcgacgccatcacacgccatatgctcgtgccgggcgcgcaaaaagaatacattgcgcaaacaaacgaaagcgccattgtttccgcaaaacgcatcgcggcaaaatacaactgccacggcgcacattccgacgccatttcagagtttgcatgcacgcttttcgacaaattcaaaagcctgcacggtctgtcaagtgacaaaaaaatcattttgcagctcgcgtccattctgcacagctgcggtcaatacatcaacgtgcgcatgccgaaccagtgctcatttgacctcattaaagatctcgacattttcggcctcacgcacgaacaaattctgctcacggcattcgtcgccggcagcgatgagttcaccatgccgaatgttgccgatgccggtgcaatcccgatgacggaagaacgccgtttggaaatcttaaagctcgttgccatcttccgccttgcaaacgcgctcgataaatcgaagcgccgtaagctgcgcatcagtaaaatccgcattacaaacgaaaagctggagatcaaagccgtcgcttccggcagtgccctgctcgaaaaatgggcgtttgaggaatgcgccggtctctttaaggaagtattcggtctcagccccgagctgcaaatcaaaagcgagctgctgaaataacgaaaggacggaaaccatgtctgataaaaagaattactattataaccgcgagctgagctggatggacttcaatgcgcgcgttttggaagaagcccaaaagaaagataaccccctcatggagcgtttgcgcttccttgccatcaccggctccaaccttgatgaattcttcatggtgcgcgtggccggtgtaaaaagccagatcgcctcaaactacacaaagccggatgattccggcatgacgccgaaggagcttctctcggcgctcgataaaaaaacgcacgcctttatggaaaagcagtattcctgcctataccgctctattttgccggtcctcaaaaagcaggcggaaatcgagttccgcacgccggaaaagctcacgcacgagcaaagagcctttacggacgagtattttcatcgcgtgctgttccccgtgctgacgccgctcgccgtagacagcagccgcccgttcccgatgctcgcaaataaaagtctgaacctcgccgtgcgcctttcttccaaggaaaacaagggtgaaaagtgctttgccgtcgtgcaggtgccgtccattctgccgcgctttacggagctgcccgcagacggcgacacacgctgcttcatcctgctcgaggacatcatcaccgattatcttgaggagcttttcgagctgcacgagattaaagccgtgtgcccgttccgcatcacgcgcaactccgatctcaccatcgacgaggaagcggacgactttatgtatgagattgaaaagtccatcaagcgtcgtaagcgcggccgtcccgtgcgcttggagctcctgcagcacaccgatgaagatacccgcaaatttctcataaaagcgctgaacatcaatgaaagcggcatctatgaggtgcagggacccattgacctcacgttcttctcgaaatttgcgaatatcccgggctgcgaaaaactctgctttgcgcccattcgtcccaccacacccccgggcgatttcttcggctacaccgatattttcagagccatccgtgagggcgaccgccttgttcaccatccatatgagacattcgactgtgtcgtgcagttcatcgcacaagccgcagaagacgaaaacgtactcgccatcaagcagacgctctaccgcgtcagcggcaactcgcccatcatcgcgtcgctcatcaaagccgccgaaaacggcaaacaggtcacggtgcttgtcgagctgaaagcgcgctttgacgaagaaaacaacatcaactgggcaaagaagctcgaaaaagccggctgccacgtcatttacggtctgaccggcctcaagacccactgcaaaatcgcgctcgttgtccgccgcgaggaagacggaatccgccgctacctgcacctcggcaccggcaactacaacgactctaccgcgaaaatttataccgacctcggcctgttcacctgcaacgagcagttcggcgcagacgcgtcctcccttttcaatgtcatcaccggctattcccgtccgccggagtacaagcacttcatcgttgcgccgcacggcatgcgcagcttctttgagtacatgatccgtcaggagaccgaaaacgccaaaaagggtttgcccagcggcatcacggtcaaagtcaactccctcgttgacccgaagatcatcgagcttctctatgaagcctccaaggccggcgtgcgcgtgcagcttatcgtgcgcggtatctgctgcctcattccgggcatcgaaggcgtcagcgagaacatcactgtcatgagcattgtcggtcagcttctggagcacagccgtatcttccgctttgaaaatgccggcaacccgcgcatttacatgggcagcgcggactggatgccccgcaatctcgaccgccgcgtggagcttgttttccccatcgaggacgaaacacagaaggcacgcgccttcggcattcttgataccatgctgagcgacaccacaaacgcccgtttcatgcagagtgatacaagctacgagcacgttgacctgcgcggcaagaaaaagatcagctcgcagcttacattctaccatgaagcacaggcgcgtctgaaagagctgcagtccatcgaaaaggacagcgttttgatcccgattcactccgcggaagaataaagcttgcatagttgtaaataaaagattataatagaataaattgagcggacttcggcgcgttttgctgtccgcacaccacaacgaaaggttgaggaacgatgaaaagaatcggtattttaacaagcggcggcgactgtcagggcctcaacgcctccattcgcggcgttgcaaagtcgctttacgaagaattcggcaacgacgtagagatttacggcatcaaagacggctataaaggtcttattttcggtgaatacaagctgatgaaatcggaagatttttccggcatcttaacgctcggcggcaccattttgggtacctcccgccagccgttcaaactcatgcgcgtcatcgatgaaaacagtgtcgataaagtcaagaacatgaaggataactacaagaagatgaagctcgactgcctcgtcatcctcggtggcaacggcacacaaaaaaccgcaaaccttctgcgcgaggaaggcctcaatgtcgtctccctgccgaagaccatcgacaacgacgtctggggcaccgatatgacgttcggcttccacagctccgtggagattgcgacgaatgtcctcgactgcattcacaccaccgccacctcccacggccgcattttctgcgtggagatcatgggtcacaaggtcggctggctgccgctttatgccggcatcgcgggcggcgcagatgtgattttgctgccggagatcccgtatgatattgacaaaatcgcaaaaacattggataatagaatcgcaaacggcaagaagttctccattctcgccgtagccgagggtgcgctatccaaggaagaagccgccatgaagaagaaagacttcaaaaaggcgcgtgccgaaatgaagtacccgtccatcgtgtaccgccttgcagacgagcttgcctcccgtgtggataacgagatccgtgtctgcgtaccgggtcacttccagcgtggcggcagcccgtgcgcctacgaccgcgtgctctccacacgcttcggcgcggcagccgcaatgctcatccgcgagaagaactacggcaacatggtcggtcttgtcaacggcaagatcgtcccggtgccgctcagcgaggtcgcaggcaagctgaaaaccgtcccggtcgattgcgaagaaatcctcgcagcccgtgagatcggcatttccttcggcgactaaattcgcacaaaacgtcaaaagagacgttttaataaaaaggattgtattgaaaggattgacccacatgaaattttccgtcagtatgtacagctacatgcagaagatccgctccggcgaggctactccgtttgagctgatcgcgaaaaccaaggaactcggctttgatgccattgagtttgtcgattttaccgatttcggcaccggcaccaaggaagagcgtctcgcccacgccgaagagctacgcaaggaatgcgagcgcgtcggccttgagatttccgcactcgtcatgagctgcgacttcatcaccggcagcgacggcgacctcgataaagagattgctcgcgtcaaggattacgtcgacatcgcacacgtcctcggtgtcacccgtatgcgccacgacgcagccattggctatgcacgcaactccggtgacttctgcccgtttgatacaatgctcccgcgcctcacaaaggcctgcaaggaaatcacagagtacgctgcacagttcggcatccgcaccatggtcgaaaaccacggcttctatgtgcaggattccgagcgtgtcgagaagctctacgcagcggtcgacaacaaaaacttcggcctcctcaccgatatgggcaacttcctctgcgcagatgaggacccggcttccgcatttgcaagagttgcgccgtatgcgtactatgtccatgcaaaggacttcatcgtaaagccgttcacggatgccgatccgggcgaaggcagcttccgctcccgcggcggcaagtacctgcgcggcactattgtcggccacggcaatgtaccgatcaagcagtgcatgtatcagctgaagcgtgcaggctatgacgactgcatttccatcgagtttgagggcatggagcccgtctttgatgcactgcgcatcggccttgcaaacctcaagaagtattgggctgaggtctgatcccccctatatccaaaaacctgatttaaaggttgggcttcgtgtcttttcggcacggagccttttcttatgcccctaacgggagatgtcatatcacatgttatatcaccttgaaattaacttctcttctttttcgaatcatatcattttagcacggacaagagaaaacagagcttttttgttcccccgcttgcaatacaactcagaaaggtgtacaatgaaaatgaattttgcgcatctgtgtcctgcatagctgcacaagaacttaaggagtgattgaaaatgtccgttaaagaaaaatttctggattacgtaagctatgacacccagtccgattcttccagcaccaccatgccctccaccatgaagcaaaagctgctcgcacagcaccttgccgatgaaatggtcgccatgggcattgaagacgcacacatggacgagtggggttatgtttacggcaccattcccgcaaactgcgaaaagaagaacgtcatcggcttcatcgcgcacatggataccgcagaagaagtctccggcgcaaacgtcaaagcccgcgtcattgaaaattacgacggcgaagacattgtcctcaacaaagagctcggcatcgtcaccgacgttgaaaatttcccgattctcaaaaaattcaagggtaaaacgcttatcgtcaccgacggtaccaccttgctcggcgcagacgacaaggcaggcgtagccgagatcatgcaggctgcggaagacatcatcaaaaacaacctcccccacggcgaaatccatatcgcatttaccccggacgaggaaatcggcgcaggcccgaataagttcgacgtcaagggcttcggctgcgatttcgcctacacgctcgacggcggcgagcttggcggcctcgattatgaaaacttcaacggcacctccgccgatgtggagattaccggcagaagcgtgcatccgggcagcgcaaagaacaagatgatcaacgcaagccgcgtcgccatggagttcgcttccctgctgccgagccgcgaagtgccggaaaacaccgagggttacgaaggctttgcgcatctcaacaatatggagggcgacgtagagcacgctcacctgcactacatcatccgcgaccacgaccgcgaccttctggaagcgagaaaggataaattcaacctcgcggccgagttcatcaaccgcaagtacggcgtagagctcgtcaaggtcacactgaaggacgcatactccaacatgaaagaaatgatcctgccgcatcaggaaatcctcgacgttgcccgcgccgccatgcgcaaaaacggcgtagagccggtcaccacccccattcgcggcggcacagacggcgcacgcctgtcctttatgggtctgccctgcccgaacctctgcaccggcggagagcttgcacacggcagaaacgaatttgccgttctggaagagatggagaccatcgtcgagatcgtcaagtccatcgccgagctcgttgaataatggaaaaggaacctaaaactatgctgcgatttggaacaatcggcaccggctggatcgcgaacagctacgtagacggcgctttggacagtggtctgtggcagctcaccgccgtttactcccgcacaaaagagaaaggtctggcttttgctgcgccttacggcgttaaaaccgtctttaccgacctcgaagaaatggccgcaacggacaaaatcgacgcggtgtatatcgcaagcccgaacaagctgcatattgagcaggcacgtgtttttctggagcacggcaagcacgtcatttgcgaaaagccgctttccgcccacgcaaaagatgtagcagagctgcagacgcttgcaaaagagcgcgggctcatctatcttgaagccatcatgttcatgcacctgccgcagagaaagcttttggaagaagctttaaagaagatcggcgatatctccgtggcgaagattgatttctgccagcgctcttcaaagtacgatgcgtacctcgcgggcagcctgccgaatatctttaatcccgcgctcgagaccggcgctttgatggatctcggcgtttattgcgcctatcccgcgctgtatctgttcggtaagccgcagaacacgctcgccgtgtcgcatttattggcgtccggcgcagacggcagcgacattgtcgccatgcagtacccggataagctcgtgaacctcgtgttctccaaggtcggtcaggccggcgcgaacacggattttcagggcacaaacggcactgtatccgtggaatccatctcaaaactcgccaacatctccatccgttataacaacggcaccgtggaggaagtttgcggcgaagaagaaaaattcaagctgatgggctacgaagcgaaggatttttaccgctatattacagaacccgaagcttcccgcgcggaatacgagcagtgctccgccctcgcttacgacgtttccgcctatatggaagaaatccgcaagctcgcgaacatccacttcccctccgacaactaaaccataaaacaaaacggcaccgcatgatgaagtcttttcccgtgcggtgtcgttttcgtatggagtgaattcagttcttagcgtctcttttgtcctttttacgcgggctttccgggtcttcatctgtgtgccgaatatcctgcattacgtcccatggcgtcagcataccgagcagcggctcatctcggctccccgtcttcgtgatgaaaatgaccgaaaggcgtttgttgcgaccgcgtatcttctcaaacatacgccgcgcctcaatgcaggtcgttttctcgtcgacaaacgcaaagttttccacatgcttttctacggccagcattttcccaagctgtgaaagcgtcgtttccttcgtgatgcgcaaggttgggtcacgcaaaatgcacgaaaagattgtggacacgctgaatacaccgagaaatttctctttttctataaccggaatgtgcgaaaagccgctcttatccatgctttccatcaaatttaaaacgcgagaagaaagccttgcacagcgaatgctgctgccttttgtcgcaaagtcgagtgcaagcggcggacggcaaacgtagtcgagcgcctcccgcagtgcttccaccaccggctcgctcggctccacgatcggctcgccgccgaggttcgcattgtgcgtcatcaaattgcggatttcccggcagagattcagcgtctcgcgcacaggcgcgctttcataatggttgatgtattcaaaaaccacgctggaataccgccgctgctttgcggtgctgaactttacctcaagctcatcctccagctgtttatataaatcgataaattcatcgctgcgcatggatcacactcctttgtttaaggataccacaaaaaacgcctccgcgcaaggctttgcagataacaaaaaaacccgatacaaattgtaccgggtttctggagctgatggtcagaatcgaactgacaacctgttcattacgagtgaactgctctgccattgagccacatcagcatattgggttttgcaacgttgattattataccgaattttctccgtaaagtcaacccctatcgcgaattttcttttaaaaaatatttcgcgcggacaaaatccgcctacgccgggcggtttacggttgtaaccacgcacaatgtgtggtacaatgatacatacagaaattcaagatgggaaagggcggcttttcatgggttataagctggagctcggcgcatggagcgcggttttcgccgtgccgaacgcgcttgtagatcgatatatcaaggaggcggacggagatcagctcaaggtcatgctgtggcttctgcgccataacgggcggccgtatgcggcggaggatcttgcagccgcgctcggcatcaccccgcagcgtgtcgataccgcgctcggcttctggatgaaaagcggcctcatttgcagcgttgacaccccgctggataccgcccttacgccgaatcacgtggagagccccacgcccgtcgcgccgcagccaaaggccgctccaacacaaccgcagcgccccaccgcgccgaagcgtatgctgcgcccggacgggctttatatctcggagcgcgtagagtcctccccggagattcgccgccttgtagaggaagcgcagaacctgctcggcaaaacgctttcccccgcgctttctggcacgctcattcaggcgcacgaagattacggcctgccgtgcgaagtcattttaatgcttatcgcctacgcgaataagattggccgcgcaaacacgagctacatcgaatccaccgtacgcaactgggcagattccaacattttaagcatcgccgccgcggaggaaaagctgcgcgaactcgacgagaccgccatcgcgtggaagcgctgtgaaaatgcgttcggcatcacctcccgccgcgcacccagcaaaaacgagagccagtttgctcacagatgggtgttcgagtggcgcatgcccgatgagcttctaaacgaagcctataaccgctgtgtggataacaccggcaaggtcaacatgaaatacatcaacgccattttggagtcgtggcacaacgcaggcatccataccttgaaagaagccgtggatgaaagaattgccgccgaagcccgccgcgagggtgcgcataagccttcttatgaccttgacgaatacgaaaaatacgatatttttgctacggagaaataaaccatgggatatgcaaggcaggtctacacgcaagctgaaaatgaattaaacagacgtcgcaccaccgcgcaggataacgcacagcgccgcttagagaacttctacgccgtctgccccgaagcggaggacgtgcgcagacgcatcgcttccacagcaagtcgggcggctatggccgttttgcgcagcggcaacgcgcgcgaaaccatggaagctttaaaaaatgaaaatctttcgctgcaaaagcagtttgccgatctcctcgccgcgcacggtctcacccgcgctgacatcgagccacagtacacctgcaagcgctgcgaagataccggctatgtagacggccgcatttgctcctgttaccgcagtttattaaagcaaatcgcctacgaaaacctaaaccgtatctccccgctgacgctctcgtcctttgaggatttctccctgctctattattccgatgtttccgtaaacggcgagcgttccgaccgcgagcaaatgcgcaacatttacgacttctgccggcgctacgcagacaacttcaaaaaggacagcggcaacctgtttttcacaggcgctacgggtctcggcaaaacgcacctttccctcgccatcgccgcagaagccatcaataaggggttcggcgtagtgtatggcacggcgcagacttttgcgctttctctcgagcgcgagcgcttcacccgcaccgaagaatccggtggcgatacgctcgatcttttaaacgactgcgacctgctcatcatcgacgacctcggcatggaaatctcgtcgtcttacatcacggcaacaatctacaatgtgattgatacgcgcatcacgctgaaaaagccgaccatcatcagcacaaacctctccatgcaggagctcgaaaagcgttacaacgagcgtttcacttcgcgcataatcggattctacgaccgcttgatcttccgcggtaaagacatccgcatgaagaaaaagctcaatccgcaaaacaaacaaaattagcacgcaagcaaaaagccgaacggcatcggagctttccccgccgttcggcttttataatttattttaatacttcgcggattcaatctcttcaatcacgccgcgcacggctttctccaccgcgccatcttcaaacggcaccggaatgccgacataatgcagcagatcaaaatagcccagcgtgccacccgctttgcacagcttcaaataacgtgcccaagcgctctcgcggtctttcttcatctcgtcatagaagaagaatgtgcagatctgcgccagcgcgtaatcgatataatagaacgggtagaggaaaatgtgctgcttctgcatccaaaaaccaccgttttccaagaatgcgttgccgtcataatcgcgccacggcatatattttttctcaatgctgcgccacacaccgcggcgttccttcgccgtcatcttcgggttcttgtatacctcgtgctggaactcatccacgcacgccatgtacggaataacggccagtgcgtcgcacaaatgtgcataacggtattcgtccgcgcggtcgccgaagaatttatccatccacgggtaggtgaaaaactccatcgacatcgagtggatctcgcacacctcgctcgtagagccctgcaaaacgccgatcggaatcaagcgctcgccgagatatgcctggaacgcgtggccggcctcatgcgtcaaaacgtccacgtctgcagaagtaccgttaaagttcgagaaaatgaacggtgctttgtattccggcaaagatgtgcagtagccgccaaggtgcttgcccgggcgcgtctcaaggtcaaacagctcgtacttcgtcatgaagtcgaagaattcctttgtttcgggcgagagcgcgccgtacatttcggtcgcctgccccaccatataatctttgccgccgataggatctgcgttgccgcctgcaaatgtcaaactctcatcgtagtatttgacggaatccaaaccaaggcgctttgcctgcgccttgcgcatgcggtccactgccggcgtgataaccgtgcggatctgctcgcggaacttctccacgtgctcgggcgtgtagtccagtctgcccatattgcggtacgcaagctcggtgtaattgtcatagccgagcttcttcgccatctccacgcgcacttcgatgagcttatcgtacaactcatcgagcttgtcggaaacgccctcgtaaaggttcgcccacttttcaaacgcttctttgcgctcctcgcggtcggtgctctccatatgttttaaaagaccgtagaaattgcaggtctcgccgcggaaatccaccttgcaggaagccgcagccttagaatactccacggaaagctccgattctttcacaagctccgggataatgcgctcgtcctgcgtcttgaggtcgttttccaaaaccgcgatgaaatgcgcgccgtattccttttcaaagtccgcacggaacgggccgttcacaatgtcttccttcatcgccttctccgccgggatcaggttcggcagattttcgttcaggtacgccatttccgcttcgtagaattcatctgtcgtgttcatcgtgttgcggatgctgcaaagcgacgcaatcgtagacaagtgcgtgtcgagcttttcagcgtctaaaaacacctttttcgcttcctcaaaggtctttgctgccttaaatgcctcgctgtaccgcttatattcctccactgccgccgcaatgtccggtcgggtgtacggaagttcactgaatttctgcacaacaatacgcttcctttccaaaatctatttgcgcttatcataccactgcttcgcacattttgcaagctgtttttgtttatcctgcacagcaaaatgtaatctatgcaaaaagagaccgcgcacaaagcccgatctctaatctttgagataaattttaagttatttcagctcgccaacaacctcacgaatggacttcgccagaatattgaggcccttttccagcgtatccatcggcaccttcagctccggcatgatcttcacaacggaatcacggcggcctacacgctccacgatgaggccgttttcaaacgccttgtgaatgactgccttcgcaacatcgccctcaaacgcgccaaaatccacgccccacagcaaaccgatgccgcgtgtcgtgatgcggctgtcaatcgtctcaatgttctccttgaggaacttctccacaaacggcgcacgttcacgaaccgcgtcttccacgtgctcgttcagcatgaattccaggcccgctttcgctgcgaccaaagacagctgatagccgcggaatgtgccgttgtgctcgcccggcttccactggtcaagctccgggcgcaacagcgtcagcgcaaacggcatgccatagccgccgatggacttcgagagcgtcacaatgtccggcgtgatgcctgcgcgctcaaacgagaagaaccaaccggtacgggaagcacccacctgcacgtcatcgacaatcatcaaaatgtcgtacttgtcgcacagtgcgcgcacgcggcgcagccactcatcgggcagcacataaatgccgccgtccgcctgcgtcgtttccaaaatgatcgccgccggtttctccacgccggagtggtcgtctgtgatcaggcgttccatatacgctacggtgtcgagctccgggaacatatacggtgccggaatgtgcgtcacgttgtaaagcggcacgcctgcacccttgcgggagtccgcattcgttgtcagcgctaaagaacccagcgtcatgccgtggaacgcacccatcagtgcaaagacattgttgcgcttctttaccttgcgagccagcttcaaggccgcttccaccgcgtttgtgccggtcgggcctacaaactgaattttatagtcaaagccgcgtgggcgaatgacttcattttcaaaatattcgatgaattcgcgcttcggttttgtgtacatgtcaagcgcgtgcatcacgccgtcgttttgcaaatattcaacgaccttctctttgatgtacgggttgttatgcccgtagttcagcgcgccggagccgcaaaagaagtcgatatactccttgccgttctcatccgtctggatagagcccttcgccttgacgaagaccgtcgggaagttacggcagtaagagcgaacttcggattcatacgtttcaaatgctttcgtgttgtttgtactcatgtagtaccatcctttctaccatgccatctgcatgattcagcgatcacacgcgttatgcgtggggctgcgtttttcccgctcatgagttttgaagcgagagtcagcggtcgttcggccaatgtgtaataaaaattttggccggatccatacggcacgcacaaatcgttttttgcgataccgtgattaagtttaccacacttgtccgaaaaaagaaaggtcttctttcgtaaaaaaacatatatctctgcaaaaattctgcaaaaaagagcagcgcctgcaaaagacgctgcccaaatttacaaaatctaaatttattcgatgttctcgccgagcgtaccctggctgagcgccttcagatacgcagtgatgaaatcatcaaggtcgccgtccatcaccgcgctgatgttgcccttttcgcagcccgtgcggtgatcctttacgagcgtgtacggcatgaagacataggagcgaatctggctgccccacgtgatctccttctgctcgcccttaatgtcggagattttttcaaggtgttcacgttccttgatctcaacgagcttagagataagcattttcatagccacgtcgcggttctggtactggctgcgttccacctgacaggaaacgacaatgcccgtcggaatatggatcaaacgcacggccgaagaggtcttgttgaccttctgtccgcccgcaccgctcgcacggtacacttccatcttaatatcgtccgggttgatttccacgctgaggtcctcgtcaatctccggaataacctccagagaggagaatgaggtgtggcggcggcctgcggaatcgaacggcgagacgcgcaccaaacggtgaacgcccgcttcactcttcaaaaagccataagcattttctccctcgacaaggatggaagcgctcttcaggcccgcttcgtcgccctcaaggtaatcgagcgtagaaaccttaaagccgtgacgctcaccccaacggttgtacatacggaacagcatctcggcccagtcctgtgcctccgtgccgccggaacccgcatggaacgtcaaaatcgcgttcttactgtcatattcgccggtgagaagcgttgtcagacgcatcgtctcaatctctttgccgatggcctccacttcctcctgtgcctccggcaaaagagaaaggtcttcttcctcattgcccatttcaatgagcgtcagcgtatcttcgcagcgggaaacaaggttcaggtacgtctcgtccttctgttttaacgcagcagtcttctgcaaaatcttctgtgcagattccatgttgtcgtaaaagcccggctccgccgccttgttttccagcatctccacttcttcacgcagtctttcaaggcccagcgcgtccttcaattcatccagcgccgcctgcttttcattcagttcatgttttaatacttcatattgcagcatacgttttcgttacctttcaaaaatatccgtccaaacccgccttcaaacatttcacggcggcgttcagcttaaatgtgcgcaaatctctgtttattataatagataacccgccgtttgtaaatagaaaaaatgcgggaaaacgcacggtttcgctgaaatctttatattagccttttttgaagttttacttcgttttctcgctgaattattaacagtctgaaaatttgcacgcattgcattgcgattgcgggcattttgtagtattatatgaataagaaaataattctggcagtattctgaccgtctttcgaatattgccaaccgaattttggaggttctgttttggactacaaaggcatcaagtgtcccgtgtgcgacaagccgtttacggaaaatgacgatatcgtcgtttgcccggtctgcggtgcaccgtaccacagaggctgctataaagaaaaaggtgcgtgcattttcacagatctgcatgaaagcggcaagacttgggcgccgcctgttccgccggacgcgccgaacacggccagtgagcttaaagacaaggaatgcccgaactgcggcaccttaaacgcccacagcgcgctgttctgcaacatctgcggcacttccctcaccggcgcgccggatgaacaccgcaacacgggctacaacacgcagcaaaatccgaataacgcgaacaatccgaacggctataacaattacaataacccgtacggcagttatcccccgccgcaaaacaacgcaaactatcagagccgcggctttggcggcgtgccgttcgcgttcgaccccatgggcggtgcaaatcccgcggaatttgttgcggataacgtcacctacggcgacgtcagcaaggtcgtgcagcagaatacggcgtattacctttccgtgttccgcaatattaagtctttcgggcgcagcaagttcaatttcagcgcgttcctgttctccggcggctggctcctgtatcgcaagcagtacaaggcgggcatcatcacaacgacaatcatgttccttttatatatcgcgaacctgatgctctcgtgtttcgtcgtcaaccccatcacgacgcacgtcatcgataacgccggcgtgtcttcatcggatctcagctacgtgcagcttgcaaacctgctttcgcagtacttgatggataacccctcacagtatcttttgttctgcctgccgcttttgtgcagcgccctgatgctcggcattatgatcttcgtcggcgtgcgcgcaaaccgcatgtatttaaatcactgtgtccacaccgtgcaggagattaaaagcgtcagcaatacggaaaccgacctttccgcagaatacaccgcacgcggcggcgtgaacgttgtcgtaacgttctgcctgctcgcctgctacatgatcctgcgttggatcccgctctttttgacttgattccagcttaaaagcgacattaccgcttacggcttcacgcggtaatgtcgtttaagaatagaacccctttggaaaataggaagtatatttggaggtattgatttatgaaaaccgtcagaaaagccgtcatccccgcagcaggccttggcacacgcgtgctcccggcatcgaaagcgatgcccaaggaaatgctgcccattgtggataagcccgctatccagtttattgtggaggaagcggtccgcgccggcattacggatattctcatcatcacaaaccgcggcaaatccatcatggaagatcatttcgaccgcgccccggagcttgaggagcgtctgctcgcaagcggcaaaaaagaagtgtacgatgaagttgtgaaccttgcgcaccttgcaaacatcacctacatccgccagaaagagacgcgaggtctcggccacgccatctcctgtgccaaagcatttgtcggcgatgagccatttgccgttctctacggcgatgacgtcatcctcggcgaagatcccgcctgtggccagctcatccgcgcttataacgagaccggcaagggtgtcgtcggtgtgaaagaggtcagtgaagaagccattcagcgctactcctccctcaaggtagagcctctgcacgataactggttcacctgcaccgatatgattgaaaagccgagtaaagataagattatgtcgctttactccatcctcggccgctgcgtattgccgccgcagatttttgacattctcgcccacaccgcacccggcgccggcggcgaaattcagctcaccgatgccatgtgtgagcttgcccgcaccgaaagcatgatcgccgtcgatttcaccggcaagcgctacgatatgggcaataagctcggcgtcatgcaggcacaggtagaggtcgccttaaagcaccccgagattggcgaaagcttccgcgcctaccttaaagagcttgccaaaacgctttgagtgtaaagttgattcgcattacacgtatgtaaagttcatttgctttgtaaggttagtcaacttcacaaagcgcctatatcaaatttgattttccaaaaatccgccgagttccaagatttttcttgactttgcggatttttatgttataatacttttgttagtttgtgcttatgcgttttgtgtaacacaaatgacaatccttgctccgtttaaaagtacggggccaaagtccaaaaggaggtgcaaaccatgacagaggtagtaaagaacaagtacgagaccgttatcgttctctccgcaaagctcggtgaggaaggtaatgcagagctggtcgaaaagttcaaggcattgattgcaaagcacggcactgtcgagagcgttgacgagtggggtaagagaagactcgcgtatccgatcaacaaggaaactgaaggctactacaccctcgtaaacttcgagagcacgccggacttcaccgctgagctggacagacgctataagatcactgacggcgttctccgttccatcatcgtgaagaaggatccccgttttgcaaccgctgctgcaaagccgcgtaaagccgctgagccgaagccgatcgacgttgaggctgttgcagccgaggctgtcgaagcaaacgagtccgctgctgagtaagttttttgaaacgaaagagagttgttacctatgttgaatgttgcagttgttatgggcagactggttgccgatcctgagcttcgccacaccccgagcgatgttgccgttaccagcttcacgctggcggtagaccgctcctatgttaagtccggcacagaacgtcaggctgatttcattgatgttgtcgcttggcgcagcaccgcggattttgtatgcaaatacttccgcaagggccagatgatggcggttcacggttccattcagacacgcacatatacagataaggacggcaataagcgcaaggcgaccgagattgttgcgaacgatgtcaattttgcggattccaaacgcagtgacagcggcgcaaattacggtgccccctccgccccgtcttacggcaataattacggaagtaacagcgcagccggaaatgaaatgcagcgcccggcttacagcgaacccgctcccacctattcaagtggtaacagcggagatttcgaggagatcatcggggacgacgacctgccgttctgatgatccaacaacgactaagataaggaggctttcgcaatggcagacagaccggagagagataatcgccgcggtggtcgcaagggccgcagaaaagtatgcagcttctgcgttgacaaagcggattacatcgattacaaggatgttgccaagcttcgccgttttatttctgaaagaggcaagatcctccccagaagagttacgggaacttgtgcacatcatcagcgtggcctgacagtcgctatcaagcgtgctcgtcacctcgctctcctgcccttcagcagcgactgatcgtgcagatctaatatcagcgtacaagggagattttcgtcggaaggtctcccttttgctatcccccattgatttgcaaaacccgcactctgtgcctttaacggtacagaatgcgggtttcttttaattgaattgaatcgtcatcagaacagacgaatgatcttgccgccgcagccgcaatggtaccgctccggatgctgcaccactgccgtgagtttcatgcgcggaaactgccttttgcattttgtacattgcagcatatatttcaccggtttctcctcgcactccacaagtgcttccttcgtcgttgccgtaatgcagtagctatacgcgttgttcatcttacctgcgtatgtcttccaaaggagcttgtgattcatgcagcgcgggcacgtgtgcaaaagctcatgcgccaaaacgctgcgcacacaattctcgtccttgtcctccaaatacgctgagacctcgattcgatattcatatttttcgccatgtaatcgcatacagcgaccgtagcgcttttttgcgcgcgtgttgatctgtacctccggctcgatgttgcccgagaccgggatacccagcgcacgcacttcttcgtagatttctttcatcaatgcgttataatcatacttcataaagtttcctcgcttttctttattttactactatctactacgaaagaaaagcggtataattaaaaaggaaaatcgttttcctatcaacttttcggaggaattttcatgaagtattattcgatcggctacgccgtcaacgacggtttgccggaagttacatgcgaagatgtacagaagctcacccacatgaaccttgcgttcggtctcatcagcgaaaacggccttttggatctgcaccagatgacacatctcgatctcatcccgcagttccgcgattggaaccccgctctgcgcgtggtgctttccgtcggtggctggggcgcgggcggtttctccctcatgtcccgcaccgaagaaggccgccgcgcatttgcggagtcttgccgcaaagccgtggaggagtatcacctcgatggcatcgatatcgactgggaatacccatgcagcgaccaagccgagattgactgtgactcgagcgataaacagaactacacaaagctcctgcaagctctgcgcgacgcccttggcatgaaccgtatcgtctccaccgctgtcggcgcaggtgattatttcccggaaaacaccgaaatggacaaggtcgccgagattgtcgattacgtgcagctcatgacctacgacatgcgcaacggcttcacgcatcaggccggccaccacgcctccctcagtgccagccacggcgatacgagcaacacgaacacgcgctacatcgtcgagctgttccacaacgccggtgtgccgtacaataagctcgtcgtcggcgcagcattctactgccgccattacacgggcgccgcaaacgtcaacaacggcctcctgcaggaagccagcgccggtatgtacggcccgaactacgacggtctcaccgaggagttccgccgcgagcataactacacagaatattgggacgaggacgctgaagccgcatatctctggaacggcgaaacattcatcagcttcgagtcccccgaggccatccgccgcaagtgcgagtacgtcaaggaaaagggcatgctcggcgtcatgtactgggagcacagcgccgaccacacccgtgagctgctcactgtcatcgcaaaaacactgaatatctaaattctaacggaaaaggagcctgcgcgcatgaaaaccgcgttcaggctccctttttaccgataaaaacaagaactatccctgttttttgtaaaataaaagacccaccggaaattccgataggtcttttggcgtggtgcgcgagacgggacttgaacccgtacgtcataaacacacgcccctcaaacgtgcctgtctgccaattccagcactcgcgctcaacaatatgtattatagcataagccgcgctgtttgtcaactgttatttctcaaaacgcaaaaacatgtccgttttttgcattttaccgcaaaatgctggtaaaaagggtcgaaacatgctatactgcatgtaacagaaacacgggaggaaaacacgatgacgtacacaaaacgctatatgtctccggttggcgtgatcttgcttgcggcagacgacgcggggcttacggggctgtggtttgagggcagcaaatattttgcggcggagttgccgaaggcgcacatagaacaggacacacccgttttactcgaaactatacagtggctcgacgtatattttgccggaaaagaaccggatttcacgccgccgctacacctcatcggctcggattttcggcaggcggtttggaacatcctgctctctatcccctacggccggacgatgacctacggccagattgcaaagcagcttgcaaaaaacaccgggatagaaaaaatgtccgcacaggcggttggcggtgcggtcgggcacaatccgatctcgatcatcgtcccctgccaccgcgttgtgggcacgaacggcagcttgactggctacgccggcggccttgataagaaaatcgcgctgctggagcttgaaaaagccgacaccgcaagatttttccgcccgaaaaagggtacggcgttgtaacacgcccttacactagaataaacgaaaaggtcttccgttaggattgcgggagacctttttgctataaaaaccaagctaaacgcaaaataaaagacccatcggaaactccgatgggtcttttggcgtggtgcgcgagacgggacttgaacccgtacgtcataaacacacgcccctcaaacgtgcctgtctgccaattccagcactcgcgctcaacaagtgatattatagcaacaaacaggcaaattgtcaagactattttaaaagaaacttgaatttttgtttgcaaaaagccggatttgcgtcggtttagtcctcaacggcaatggcgttttcttctttgatttcttccgcaagcagcatacgcacggggtgctcggcggtatacggtcgccatgtgggcaatcccttcccattcgggtcgccggtctttgcgaagtttgcccagtaggaggacattgcagcttcaagcgtatagtcgcacggttcccacgggcgccagcatctgttcatcgtgtggaaaacataccacagctcggacgaatggaacgcacctgcgttgtcgcccggcaactgacggttgaagaaatagatgtagctcgggcatctgccgagtttattctggttcttcgcccagcgcacggcactcttttcgagaattctatcgctcgctgcgatgtcgccgccggtgcagccgatcatgtaatcgatgtcgtgcgcattgccggaaagcgccacttcgtctacggaagccttcagcagcacgttatcaacaacgggctgccatgcaagaccgcttggggactggatggtatactgcacctcggcgattttttccgccgggacagcacgcatctcttcgatgtttttcgcgccgagcttttccatcagctctttggaggacttcacgcgcatttcaatggaaacgtcgtgcgaaaggccaccaaggccgcctgcgctctgcaaaacggcacgcttaatcttgccgcgcgtcaaatcggacgaaataagcgtctgcacgctcatgcagcctgcagactgacccgctgccgtgatgcagtccgggtctccaccgaacgccgcaatgttctcgtatacccagtcgattgctgcaacctggtcataaataccgtagttgccgctgatgccctcggggttttcggcatcgagctccgggtgcgcaaagaagccgagtgcgccgacacggtagttgatggagacaaacaccacgccgtttttcgcaaactgctcgccgtcgaactccttttccgcgccgctgccgtgcgtgaacgcaccgccgtgaatccagaagaacacgggcaacttatcgcccggctgcgcagatgcaggcgtccaaatgttcagatacaggcagtcttcgctccgctttaggttttcatcactgtaaaactccttgccgtagaggcccattttggacaggtcagcctgcggtgctttggcggagaactccagtgcggggcgcacaccctcccactttgcgtgcggctgcggacgcttccagcgcagctcgccgaccggcggtgcagcatacggcacgcccttgaagatcacgctttgtttatcatcggaaaacgcaccttcgagtgcgccttctttgacggttacgatcgtattcattgaaacttcctcccaagaataaaattcacggcaacgccgcggataaatttctgcggtgctgtcggtggtttataaatttaatttatgcgttaagctgcttcaggagcatctcacctgcgccggcgggcacactgtcgccgccaaacgataacagcgcacgcagcggcatttccgccatcatacgcgccatggcctcgcccatgccgatgtcgtccgcatctgcctgtgcaagcgggttctgtgccatcatcttgccgagaatctcgcggccgacgggactttccataatctcttcaatcgtggaattcattgtgtagacgcgcttaatctgcgtagtagaggtgacgttcaccgtcgcggtgcaggcgatgtcgcggctggattttgccgccataatcgtgtagtcgccggactcaacgtaccaatcggaaatatcggtgcggtagtacgcgaacgcacgctttgcgagcgtaaaggtgacagtcttctcctcacccggctcaagctcgaccttttcaaagccgcgcagctcttttacgggacgaatagtgcggctttccggcatgccgacgtacagctgcacgacctctttgcccttcaccttgccggtgttgcggatgttgacggagacggtcagcgtatcggtatcattcatcttggacttatcaagcgttaaattgctatattcaaatgtcgtataactgaggccgtagccgaacgggaacaacacgtccatgttctttttgtcgtagtagcggtaaccgacaaatacaccctcgcgatactcggtcttattctgctcatcgccgaagaaatagaggtacgaggggttatcctccagacggtgcgggaacgtttccgcgagtttgccggaagggttcacatcgccgaacagcagatcgagcgtcgcggtgccgacggcttcaccgccgaggtatgcgtacagcacgccgcgcacgtcatcaatccacggcatcgtgatacagccgccacacatgacgacggcaacggtgttcttctgcacttcggaaacagctttgacgagtgcttcgtggtttttcggcatcgaaagcgtgcggcgatccatgccctcggactccatggcgtccgtgatgccgacgaatacaacggcaacatcggcgttctttgcagcctcctgtgcttccttgaggagcgcttcgtcggactctgtggtgttcgtatcgtagccgggcgcgtaggtgacatcgagcccctttgcggcctcgagcgcgcttgtgaccttataggagttcacgtgtgagctgccgccgccctgaaaacgcggagtctccgcaaacttgccgatgaacgcaagtttctggctgcgctttaatggcagaataccatcatttttgagcagaaccatggactcatctgcaatcttgcgcgcttcttcgtggtcggcttcaaaatcgatcttcgtttcgggctgcttattttcggtgtatttgagaacgatgttcaaaatgcgctccacagcggtatcgagcaccttgatatcgagcgtgccgttgttgaccgcgtcaacgatctgcttgtcgtttgcggcgtttttgccgggcatttcaagctccatgccggcttcaaggcactttacgcggtctgcggtggtcgcgccccaatcgctcatcacgtagccgtcaaagccccactcgtcgcggagaatatcggtcagcaggcgcttgttttcggcggcgaacgtaccgttgatgcggttatacgagcacataatcgtccacggcttcgagtcctttacggcagtctcaaacgcagaaaggtaaatttcgcgcagggtgcgttcatcaacgacgctgtcgctggacatgcggttgtattcctgactgttggcggcgaaatgcttcacgctgacgccgacattctggctctgcacgccgtttatgtagtttttggcaagctcgccggtgaggtacgggtcttcggaaagatactcaaaattgcggccaccgagcggagaacgcttgatgttgatggccgggccgagcagaacagaaaggtcttccgcctggcaggcgtggccaagcacttcaccggagcggcggaacagctcgcggtcgaatgagcacgccatgcaggagcctgtggggtagctggtggcgggcacgctggcgttgaggccgaggtggtcggcggcgtcagactgcttgcggataccgcacgggccgtccgagaccatgacggattcaatgccgaggcgctgcggagtatcgagatgccagaagtctttaccggagcaaagcgcggctttctcttccagcgtcatttgagaaatgatcgatttcacatccatacaaacaactcctatgactgatttgagttcagtatagcacactttcgcgaaaatttccatagacaattcagaaattttgttgactttattggtagaaagatattataaaagcccatacgattacatcggcttttcatcacaatttgaatagtttctcaaaattatcataaagcattttccggttctcatcctccccgtaggcgagtgcgaaaaagcgttcgagctctttttcgtgcgtccacatggggaaatccgtgccgaacatgactttatccataccgaaatgttcaatgctccttcttgcttcatccgggttcaacacaaacagcgagctgctggtatcgacccacacgttcgcgccttttaggcacgctttggcttcatcccagcgctggtaaccgccgagatgcgcggcgatgcactttaattccggcagcttttcgagcacattcgcaagcttcttcggcgcggagagctcgcttctggcgtcacccatgtgaaataaaatcggcagatcgcgcgccatgcaggctttgtagaccggcaacatttttttgtcatcgatggcaaagccttgaaaatccgagtgcagcttgatgccgtgcaggccgagtgcctgaatttcattgagctctttttcgacgtcctcaatgtcctggtgccatgcgccaaggccgacgaacttcgggtatttttcgcattttgccgcgatgaaacgattgatggagccaacctgctccacttttgtcgcaacggagcagacgagaaatttatcgaaccctacggcggtgccctcttcgtttaaaacgtgcggcaggccgacctccgccatgggaagatcataaaaacgaccaacgttttcggtcgccttttccgcaatcttgccgggataaatgtgggcgtgcgcgtcggcggcacggtacaaaacgccgttatgcttcaccatgcgccttcgcctccctttcttttttcgagaacacacagccacagaaatcctgccgatataggttatagtctgccgaaagctgaatggagcgcttatagccctcctgttttttgaaatcggacggcaagtgcggcacgccgtattcttctgcaagcgcttcgccgatctcgtttaacttctgcgcgtttttcagcgggctgatagacagcgttgtcgtgaaaaaatcaaaatgatgccctgcggcatactttgccgctgcttccatgcgcagcttgtagcacgcaaaacagcgctcaccgccctccgggatgtgctcaagcccgcgcacggcggtgaagaattcttccggcacgtaaggcagatcgacaagcgctacttccttggtgcatggcatttcggagataagccgctttaactctgcttcccttttttgatactccgcctccggatagatattgggattataaaacagcacggtaattttaaaatgcgctgtaagcttctccaaaacggcgctggagcacggcgcacagcacgcgtgcaagagcaaagtcggccgcttttcctcgtgcgtaaaggtttcgatgagtgtattcagttcttttgcgtagtttcttttattagccatgactttattttatcaccgaagccccgttttcgcaagatatgtatactctttatcacaaatttcttacaaatccgccgtgtgaattgacaatattgccgtttcgcggtaaactatatgtatcaaattgtgctcatacggcgcatttcggtgtttgtgtgccgttttacagaaaggtttcgtgacatgtttgatttttctatattgatttccaacccgctcatcaatgtcgctgttgtttcgtggtgtgcggcacaaatcttaaagaccagcattcatctttttaaacacggcgaatttaagaaagagcgtctctctggcgcaggcggcatgccaagctcccactcggcggtaacgtgctcggtgctgctgacctcttacctgatctacggcttttcctccccgatcttcgccatggcgttcgtgttggcactcatcgtcatgtacgacgcgaccggcgtgcgctgggcggcgggtctgcacgcaaaagccatcaactacattgtggaatatttagacgatgagaacaccaaggacaaagaccaactgaaagaaatgatcccgaagctgaacgaatcgcttggccaccgcatgatcgaggtggtgtgcggcgcgctgctcggatttgcgatctcgctcatcgggtacttctgcttctaaaattcaatttgcatgaaaaaacgttgcacggagctttcctgcagcgtttttattatggctctttccttcggctttgaatgcggcgtatgagcagcgccgagccgccgacggcgagcacgccccagccaaagaggagcgatgcacggacaatccattccccggctgcgttctcttgcttctcgccatgaatgtgaagctttgcgtttccgccttccccgcactgcacggtaaatgtcatgctctcttcggcggtaagcgtaccgatataaatctcggcaaacccgagtgcagcactgtcccccgagaaaagcatcacactttgcccgttttgcacacgcagaagctttacttcaccttggctttcttctgccgtgagatataactcaagcggcacggtacattcgtttttgaatacaaggctgaggggcatgccgctttcggctatgacagtcttttctaaacggtctccgctgaaaaacaccggcagcaaaaacgccgtgatgaacgccaggacccgaaccgaaaacatgcgcacccctcctcggccgccgggcgcgcatcaccatacgcgccgcctgtaagagggcaccgacgggcctttttcttcatgtatatgcgtgcgcgccggcgttatatacgcacggtaccgcatgacgatctccgcatgcctgccgaacagcttttccaaaagcgtcaggacggtctttttctcttcgcgatagtgctttccgtgtttcatcgttttcctatgccctttccgtaaattttgtgatctctacggataaaataccacgacacggcgaaatattttgtcattcccatcatgcggaaatcttgaactttccacgcatttgtggtaaaataaatcggttattttgaatttgtgaagaaacagaggttatcatcttggccgattttagaaatgagattgaaaaacggcgcacgttcgcgattatttcgcacccggacgccggtaaaacgacactgacggaaaagttccttctgtacggcggcgccattcagctggccggtgcggtcaagggcaaaaagaatgcgcgccacgccgtttccgactggatggaaattgaaaagcagcgtggtatctccgtcacctcttctgttatgcagtttcagtatgagggctactgcatcaatattctggacaccccgggccaccaggacttctctgaagacacgtaccgcacgctgatggcggcagactccgccgtgatggtcattgacgcttcaaagggcgttgaggcacagacgagaaagctttttaaagtctgcgtcatgcgcgatattccgattttcacgttcatcaacaagatggaccgcgacgcgcagagcccgtatgatcttttggacgagatcgaaaaagagctcggcatcggcacctacccgatgaactggccgattggctccggtgtggatttcaagggcgtttacgaccgcgaaaagtccgaaattctcgcgtttgaaggagacaaagagctgcgcggtcaacacgaagtcaaagcgcacgaaatcgatctgaacgacgcggcacttgagaccattctcggcgaaagcctgtgccagacgctgcgcgatgacgtagagcttctggacggcgcgggctatgaatttgaccttgaaaaagtgcgtcatggcaagctctcccccgtgttcttcggctccgctttgacaaacttcggcgtggagccgttcctcgagagctttctgcgtatgacgacctccccgctgccgcgccaaacctcggagggtgtggttgacccgttcagcaaggatttttctgcgttcgtcttcaaaattcaggcgaacatgaacaaggcgcaccgcgaccgcattgcattcatgcgcatttgcagcggcaagtttgaaaaaggcatggaggtcacccatgtgcagggcggtcgcaagatcaagctttcgcagccgcagcagatgatggcgcagagccgcgaaatcattgacgaggcgtatgcgggcgacatcatcggtgtgttcgacccgggcattttctccatcggcgacacgatctgcacgggtaaaaaagtgcaatttgaaggcattccaacgttcgcgccggagtttttctgccgcgtgcagcaaaaggacacgatgaagcgcaagcagttcgtcaagggcactacacagattgcacaggaaggcgccattcagatcttccaggagatcgcctccggcatggaggaagtcattgtaggcgttgtgggtacactgcagtttgacgtattcaagtaccgcatggaaaacgagtacaacgttgaaattcgcatggaaacgctgccgtactcactcatccgatggatcgacacgccggacgtggacctcaaaaagctgaacctcacgtccgacacaaaaaaggtgcaggacatccgcggacgttaccttttgcttttctcaaatgagtggagcatccgctgggcgctggagcacaacgaaggcctggagctttccgagttcagccgctaaattttatgaaaagtaacgctctgtatggtttttgtgccgtacagagcgttgttgttatgtattgctgcttgatttttgcttgtggctgtccgcaacgaactctttcggcgtcatgccggtgcagcgcttaaagcgtccgcagaacgaggcggaatccgaaaagccgcaggaaagcgccgtttcactgacagtatatgtacccgccagcagcatttttttcgccgcattgatgcgcacctgcatcaaatattgcttcggcgacatgctttcggaagcggagaaaatgcggtagagatacgtgcggtctatgccgatatgccgcgcgaggtcgctgatctgaatgggatagccgtagttgcttttgatgtagccgatggccttattcacatactcatgctcgcgggtgtacgcgccgccgtgtgcagattcctccaaaacggacatcgcgccgtaaaagccgctcatcactttaaataagctgcctttgttgaattcgtcgatcatctcgtgcatgtagcggatgaactcgtcgccgttttcaagctttgttgtgtattggctgacaagacccgtgcggcgcaggatctccagtacatcaaagccgtcgaatgcgacccacatgtactcccacgggtcttcgcgatcggcaatgtaatatgtgcgctcacccgggcggatgaggaagcactcgtttgcgtgcagcgtgtaggtctcttctccgacggtatacgtacccttgccggagatgacgtagtgcagcaaatactgattgcgcacggccgggccccagaaatgcccgccctcacatttttcgtaaccgcagtaatacacggtaacagagccgccgttattcaaattttccgctctatgctttatggtgttcatacccgtccctacctttgtaattccctattcagtatagcacacttaaacacaaaatacaacaaaatcacaacgaaaagaaacaaaaaatatagaatctgcacactatgcaccgtataatgaatacaagaatcgttttatggaaggagttacaaattatgccaaaaattacattcatgggcgcgggcagcaccgttttcgcacgcaatgtgctcggcgactgcatgtgcacgccctctctgtgtgagagcgagatcgcgctctatgatatcgatgccgagcgtttggaagagtcttacatcattctcagcgctatcaacaagaatacgaacggcggcaaggcgacactgaagacctattgcggcgttgagaaccgcaaagaagcgctgcgcggtgcggacttcgtcgtaaacgccattcaggtcggcttctacgacccgtgcacaatcatcgatttcgaggtgccgaagaagtacggtctgcgccagacgattgccgatacgatgggcattggcggcatcatgcgtgcactgcgcaccattcctgttttggaagattttgcccgcgacatggaagaagtttgcccgaacgcatggttcctcaattacacaaacccgatggcaatgctttccggctacatgcagcgctatacgaacgtaaagaccgtcggcctctgccacagcgtgcaggtctgctctaaggagctcctgaaggcccttggcatggaagataaggttgaaggtcgacgcgagctcatcgccggcatcaaccacatgggctggcttttgaagattgaagacaaggacggcaacgacctctaccccgagatcaagcgccgcgccgcagaaaagaatgcgaccgaaaagcacaaagatatggtgcgctatgagtacattcgccgcctcggctactactgcaccgaatccagcgagcataatgcggaatacaatccgctcttcatcaagtcccgttacccggagctcattgagcagttcaacattccgctggacgaatacccgcgccgctgcatcaaccagatcaagggctggaaggaagaaaaagaaagcattttgaaggacggcaaagtggagcacacccgttccagcgaatatgcctcctacattatggaagctatggtcaccggcaacccgtataagattggcggcaacgtactgaacaccggccttatcgataacctgcccgccgatgcgtgcgttgaggtaccgtgccttgtggacaagatgggcgtaaatccgtgccacgttggccgcctgccggtacagcttgccgcaatgaacatgacaaacatcaacgcacagctgatgacaatcgaagcggcacgcaccagaaagcgcgaggatatctaccgcgctgctatgctggatccgcacaccgcagccgagctttccatcgacgacatcgtgaagatgtgcgacgacctcatcgaggcacacggcgattacatggcgatgtacaaataactcagcgttttcctccattgatacttctatagaaatacacccgcaggaacgaaccgcctgcgggtgtattgctttctaaccaattttactcgccgtcttccccgctgctttccgcgctgacgaggatgcccacaacggcgccgtgtgcaagcgcatcgccggggctgtcggactgataaccgatgacgcagccaaccttcacataatcgttgacttcggcgacctgcaccggctcgaaaccgagggcttttaaagccgttacggcttcgtcggcagtcatgccttctatatccggcagcgtacgcagctgcgggcctttgcatacagcaatcttcaccgtgctgccggcctcgatgatctcacccgcgagcggatattgcccggtgatttgcccctccggcaatgtatcgctgaatgtttctttgtagatctcaagctcgaatttatattttttgtccttttctgttaaggagagcagcttgtcgtaatccataccgacaaggttcggcacctcaagcgtttgcttttcttcgacaatgcccggatctttgataaacgcaacgatgctttgcggcgagaacgggctatctttgaaccacactctcgtcacggcaaagatgacgacgagtgtaaacacgaatgacgcgacaagccacaggaaagtaggcacgcgacgcttgctcggcgtgcgtccggaaccgcttggcagcgagcgcaccgtttcggtctcaacgaatttttccacaacggtcggctcagcagcaagctctgcggaaaagcgcgagaagcttgacgtgcggcgagagggatcaacttgtaggccgtttgcaatagccggaataacctgctccggcagctgctttaggatatttttggagatcatcaggcgcgggtcctgcttgcgcttcggtgcttccatgggcgcggcgcccgtgagcgcaaacaacagcgatgcgcacaggccgtaaacgtccgtgacctcatcacagattttcgttttggagtactgctccagcgcccagcagccgggaaaaatatcctcaatgaggtcggtgccggcacggcgcacagactgtatgtcaaagcccgtaacgatcattttatcgtcttttgtgatgcgcagtgtattcggcgagataccgaggtgctcgacgttctgcgcatgaatggcgccgagcgtgtgaatgaccgggtaaaagaactgttcgcactgcgtccagcttagaacgccgtgctcctccacgtactgtcgcagggaaacggactctgtgaacgagaacacgatgtactgcgtgttgttctgcgaaaatgtatcgatggcgtgctgaatgtgttttgtatcggaaacacgcaggagcttctgcgcatagcgctcgaactcgcttaaatagtcgctgaacttgagttctgccccgctgaccggcagtacggacgcgccggtctcgccgcgcacagcaatggtatgcggataaaactcacgcacctctaccttctgcgccgttttggcttccaacgcggcgtatgtaatgcccgcgccgttgacgtgcacggcctgtcccacaaggtatttttcgccgagcaatgtgccgtacggcagcgcgtttttcacctgatcgccgttgtgccagccgcagtgcggacaggtattgctgctgtcctccattgcttcaaagcatctcatgcaatataatttattctctcccatgcgctcagcttcctctcgatctccgcttcggaatgcggtgcatttttatacaacatccccgaaaaattcttttcactgaacacagtataccacattttgcctgtgctttcaaggtgtgtacgcacccgaaagcgcgaagaaactgtcggaaagctgcaagggccgcaattttaataaagttgtaaggaaaattttgcttttcttttccggcatatattcgggcaaaaaaagaacgctccagtcataggagcgttctctgtaattcgatttaagctgaaattaagccttgtcgacggaaccgaagagctccatcttttccttgacggtagccttaatcgcctcaaagcccggagcgaggagctttctcgggtcgaagcccttgccctcgagatccttgcctgcttcgatgtactttctcgtagcatctgcgaaggagagctggcactcggtgttgacgttgattttggaaacgccaagggagattgcttccttgatcatgtcggccgggatgcccgtaccgccatggagaacgagcggcatggtgccggtgagcttctgaatctcagcgagaacgtcgaagttcaggcccttccagtttgccgggtacttgccgtggatgttgccgatgcctgctgcgagcatgtcgacgccgaggtcagcaatcattttgcattccttcgggtctgcaacttcaccgccgccgataacgccgtcttcctcgccgccgattgcgccgacctcagcctcaacggagatgccctttgcatgagcgatgccgatgagctcggtggtctttgcgatgttctcttcgatcggatagtgggaaccgtcgaacatgatggaagagaagcctgcttcgatgcaagccttagcgccttcgtaggagccgtggtcgaggtgcagagcaaccggaaccgtgatcttcagggtctccagcatgccgtttaccatgccaactacggtgttgtagccgcacatgtacttacctgcgccctcggaaacaccgaggatgaccggggagttgttctcctgagccgtgagcaggatagcctttgtccattcgaggttattgatgttgaactgaccgacagcgtatttgcctgccttagccttgtccagcatttcctttgcagatactaacataaattcagcctccatgatccatgaaaggatttttatttctttgtatattatagaatatacggcgcaaaaaatcaaccctatttgaaaatatcgggctgtttcgcgttattttacaaaaaaagtaagaccttttcgcgatttcttacgacaaggtcttacaaaataccgtttatgttcagttatcggaagacttgcgctggagcaggacggcggcgatgatgatcgcgcccttgaaggcttcgcgcaggaacggcggaacgccgaggagattgaggaggttgttcataacggcgatgatgagcataccgaatacagtaccgacaacggagcccttgccgccggacatgctggtgccgccgacgatgaccgccgcgatggaatcgagctcatagccgctgccggcgtttgccgggtccatagcgccgatgcgggagacctgcaatacggccgcgatagcgacaaccgcgcccatcagcgcatatacgccgagctttacacgattgacgttgatgccggaaagacgggacgtcttctcgttggagccgaccgcgaacacgtggcggccgaacacggtcttcttagagacgatgtacagcacgagcgcgatgaggagccaatagaggatcggcataaacatctggccgccgaccttcacacgggcaatctgctggaaacccgtcggaaccttcggcgaactggactgcatgaactgctgcgtaacactgcgcaggatcttcatggcaccgagcgttgcgatgaacggcggaatcttgcccgcagtgaccatgaggccgttgaggccgccgaaaatgatgccggccgcgacggaaatcagaatggcaactatgtacgcaggtgcgccggtaaggccgatcgcgccgagccagccgccgtttgcggcgtcgatgagcgtcatggtaatggcgccgaccgcgacgagcgtagagccgacggcaagatcaatgccgccggagataatgacgaacgtcatgccgagcgcgatgataccgacgctggagttgttacgaagaatgttcatccagttgttaatccatgcgccgaaccattcgccgaagcttgcgtaatcaaagccgagcgcgagcgtctgcagaataaccatgacgatcagtgcaatgcctgtggaaaacagcgcattattcttccaattatcgcggaaccatgcgccaaagccctttttgtttgttttttcgttcattatacctgtccccctgttgcaaggcgcatgatggcctgctcattcatttcatcgccgacaagctcgccctgcacgctgccgtggaacatcacgacggtgcggtcgcacacgcggataatctcctgggcctcgctggaaagcacaatgacggcgacgcccgcctctgcgagcttcaggataatatcgtagatttcctccttagcacctacgtccacgccctgtgtggggttatcgaacacaagcacctttgggtttgcatccagccactttgccagcaccaccttctgctggtttccgccggaaaggctgccgatgagatcttttgcggagccgagcttgatgtgcagctctttttcgaaatcatcaaaatccttttcaatcttcttcgagtgcaaaaagcccatcttgctgtctctgggccatgtgacgaccgtgccgttttcaagaatactcatatccttgatgatgccgttttccttgcggttgcgcggcacatagccgacgccggccttgagcgcctgccccgtagtgcggatatgcacgggcttgctctcgacttctaccgtgccggaagccccgtgtattgcgccgaaaaccgcctgaaacagctcacttctgccgtcgcccaaaagacccgtgaaaccgagaacctcgccggcgtgcacttcaaagctgacgttcctgaaatgcggctccaacgtcatacccttgccgcttaaaataacattaccaatctttttctcacggcggagcgactgtgtgcgcacatcgtgaccgaccatgtcgcgcgccagcatattgacagaggtctccgagacaaggccggaggaaaccatattgccgtctcgcagcactgtgtagcgcgtgcagatctccatgacctcgcgcagcttatgagaaatgaacacaatgcctacgccgctctttctcagcgtattcatcatatcgaacacacggcgaatttccggctccgtaagcgaagtggtcggctcgtccatgatgatgatggaagcctccatcaaaagtgcgcgggcaatctcgacaatctgcttataggaagcatcgaggtcgcgcaccatgatacgcgggtcgaggtcaaggtccatttttttgaaaacttcgttcgttttcgcaatcatcgcggcggaatccagaaaacggttcttcttccgcagctcgtggccgataaacatattctcgtaaatggcaagatcatttacaaggtttaattcctgatggataaaagcaatgccatgcttcagggaatccgccggcgtttgaaacgcaacgcgcttgccgtccaataggatctggccctgatccgcatgatggacgccgccgagaatattcatcagggtagattttccggcgccgttttcaccgagcagcgcgcagatctcgccgccgtttaaggtaaacgaaacgtcccgcagaacatcgtttgcaccgaaggatttgtagatccccttcatttcaagtgtcatacatacactttcctttctgtatggcgtacaaataggagatctgccgcccatagaagacggctatccccttttaacaaaaaaggctgctgcttgcgcaacagcccctttgcagaacttttaaattagtaaacggtgttctccgggtcgaggtactcgtcaacgttgtctctgtcaacaactgtcgtcgagataatcttgaccggctctacgtccttgcctgcgagaacgtcaagtgccatatcaacagcgtccttgaccatcagcgggctgtaaagagaagactcaatccaaatgttctcgttttccttcatcatgttgaagtactcctggcagccgccgccaccggtgatgaccttaatgtcgtcacggtttgcttcggaaatagcctgcagaacaccgatggaagtctcgtcatccatggagtaaacagcgtcgatgtgatcgttgctggtgaggatgtcggcgaagtcagcctgaccggcttcacgggtgaactgcgtagcatactcaacaatctccatatccggcgcaatctccttgatggtatccatgaagcccttcttacggagctctgcaacggaaccggaggtcggaacgtcgagaacgacgactttgccggtggtgccgattttatcgacaatgtacttagcgccttcaacgcccatggattcgttatcgccggatacacggtaaacgccgtccgctgcgatctcgatatcgaagtttacaacgacgatgccttcatcgattgcttcctgaatcggcacttccatgccttcccactgcgggaaagcaacgatagcttctgcgccccaggacttgaggtcgtcgatctgagaagtcatttcctcagcgttgttgctggtgtagagcttgtagtcgacagtgtcgctcagctctttgcagcgctgctcagcgtaatatgcaacgcctgcaacccaaccgtgggtaacagccggtgcaagaatgccgatcttggtcttttccgtggaagtgctttcctcggaagacgcggaagactcggatgcttctgcagaggattcagagctgacagcactggattcctcagaggcagagcttgtggaagaggttccgttgcctgcgcatgctgcgaaggtgacgcagagaagcgcgagcgccagaacaatgctcaatacctttttcatgtgtgtttcctcctgtatctgcgatctgccgcagatgatctgaaatattttgagacgttgtgaataaactgtaaacgcctcatacactgggtattttactctttgctgtatactttgtcaatgatatttcatgaaaattttacgttttttagcggttttctttacaagcggcattctccctgccctatctacttgattttctgctttgcggtgtgataaaatatttgggaatatggggtgggtttgcgctttgcagctttttaacgcctcgctctactcatcgttcggggacccccctaattgggtttcccgagcaaaacagtccaccggactgttttgcttcccttcctgatttttggataggcaaaaagatttcgtcgtctgcggacgacgatttagggcgctaccccaaaaaaccgcaaccgaacgcgtgcgttcggtttaagcttcttgaaaaagcttgcgcaaaactttgtgcgttcgctttactttagcttagatagcttcaatattaaataattgaaagtgtgtttttatggcaaatatcattcccatcacgtccttttccgcgccggagttggacgtttttgcgcggcttacggaaaaccagcttgtcaaccgcgccgaccccgcaaacgcaatgttcattgcggaaagcccgctcgttatcggccgcgccttagacggcggttgcgtgccgctctcttttttaatggaaacgaagcatgtggagggcaaggctgcagaaattctatctcgctgtcccgaagacattcccgtttacacggcggagttggacgttttaacacaactgacgggctttaagttaacccgcggcatgctctgtgcgatgcgccgcccggctttgaaaagtgttgcggaagtttgcacaaatgcgcgccgcattgccgtgctcgaaaatgtgatgaatcccacgaacatcggcgcaatcttccgcagtgcggcggcgctcggcatggacgcggttttattgaccgccgccggcagcgacccgctgtatcgccgcgcgagccgcgtgagcatgggcacggtatttcaggtgccgtggacgtatctgcccgaagacgtgtcgtggcaagatacactgcacggtctcggctttaagacggccgccatggcgctgcgcgatgacacgcttcccctctctgacccgcgtttggagaaagagccgaaactcgccgttgtgcttggcactgagggtgacggccttgcaaacacaacgatcgagcattgcgactacacggtgaagattcccatgtcgcacggtgtggactcgctgaacgttgccgccgcaagcgccgtggcgttttatcaactcggcacactgcacaacaatgtatgagaaaaggacgctgcccgtcggggcaacgtcctttgttaccacttttcgaaatgcacgcggttttcttcatagcggctttcacgcggttctttattctcctctgtgggatagccgagtgcaagaatggaatgcggcacgatggtctccggcaggttaaacagtgcggcttgcttttctacgcgatccatctgcggccatgtgccgagccacacagagccgaggccgagtgcatcggcgcagagcgtcatattctgtgcggcaatggcgccgtcgatgacccaatagtccttcgcgggcgggaatgcacgctcgagatcgccgcagatcagaatggcggccgcagcctttttcagcggctgtgccggtctaccgttcgcctctgccatttcaagcagcttttcgcggtcagtgacgacgatgaacgaccaatcgcgcgcattcacgcagcaaggaccgctcatgccggcctctaaaatccggtgcagcttctcttcttcaatgggctgtgcggtgaaatcccgcacgcttctgcgattaaaaaggttttgcaaagcatccatacgggcacgctcctttatgtttttcgaagtcgttttgattttaccgttattctaccacacaaaggaaaaggttacaagtgaaacttttctgagattttaaaaacagtgaagcaccgttatattggagtttcactgttttatttttgatttatcgcaatgcgctgcggtattcagcgggcgtcatgtgctttacttttttgaacgccgccgcaaacttactggcgctgtcgtatccgacctgtgcggcaatctcggcaatgttccggtgtttttcacgcaacaaaatttccgccgcgtaattcatgcggtaatcggtgagccacgcaccgatggatgtgccgtacgccgccttaaagcaggttttcatcggcgtcagcgcaaaatcgaatcgtgcagaaagctcttcctgcgtgaagttttcggagatatgctcgacgagaaaatcgcgcacggccttggttttttcaagctgcgtcttataaaagtacggatgcaccgcgttttccttcggcggcgtcatgctgtcgagcgcgagcagcagctccagtattttgatctgaaaataggaaatacgtgctttttccggcacgcggtacatttcctcaaagatgtgcgcgacccgctccgtgcacgcaatgaccttaggcatttcgttcagcgcaaagcggcgcaaaatcgccgccggggtaacggaaaagcccgccatgacgttcagcagggaacgcgaggcctgctccgggtcgagcgtgaccatgagtccatggtaatggccggagggcaagtcgagcttctgcgagcatgacgcgccgttttcaagcttcatttcaccggcgttcacataggaaaaagcgccttctcccaacgcgtaggccatgcgcccttcgcggcagtgctcgatcgtgagccgcatacggtcgtcggtctttccgcatacgcagtgcgtcatgtgcagatctcgaaaccgaagctccacacccggaaaaatggtatagcatgtcacagtgccctcgcccgtctcgttgcgcagctgccacacggcacagccgtcactttccgcaagcagcatcgtgttttgctcttcttgttgtatcgcgtcacgcatgatacgcgccccctaacattatgttctgactgcgggaaaagaggccgctgcccgcgtgcggcattgtattaaaagttagcaatttctaactcgaattcaaaaataaaagtgaaattttcgctctatttggtcttttcgccctattttcttgctagtgatcttttatgcgccaaaacagaatttctcggttcatggttgacttctgctttaatttcatgtatgctatattcgaaagttagctaaaactaacttattcgatttcattgcataaggaggatacatatggaaacattttacggcatattgattccgtttcttggcacctcgctcggcgcagcgtgcgtgttcttcatgaaaaaatcgctcagcgatcgcgtacagcgcagcctgactggctttgcggcaggtgtgatggtggcggcttcggtatggagcttattaatccccgccatagagcaatccgcagcgctcggcaagctctcgtttctgccggcagcggtcgggttttgggcaggcgttttgttcctgcttttgcttgaccacaccatcccccacctgcaccgcagcagcgaacaggcggaaggcccgaaaagccgactgcaccgcaccacaatgatgatgcttgccgtcacgctgcacaatattccggagggtatggccgtaggcgtggtgtacgccgggtacctttccggcagcgcacagatcaccgtcgcaggcgcacttgcactttcgctcggcattgccattcaaaattttcccgaaggcgccatcatctccatgccgttgcacgctgaaggcatgaaaaagtcgcgtgcgtttttggacggcgtgctttccggcgcggtggaacccatcggtgccgtgctgaccgttttggccgcccagctcattgtgccggcgctgccgtaccttttgagcttcgccgccggagcaatgctgtacgtcgtcgtagaggagcttatccccgaaatgtcacagggcacgcactccaacatcggcacggtgttttttgccgtgggctttaccgccatgatgattttggacgtttcccttgggtgagcggtgtgaatgccattttaaatgctttgctcttttcggccttaacgactccgtttcatcgcgtaaaaagttagtttgttctaacccacaaatctattataacgcgccattcagaaaaaatcaagggcataccgcaaaagcatttcatctttaacgcggtatgccctgttttgatctcctcgattttttcaaaagttccgcatatagcaaaaagtcctgactttccgaagaaaatcaggactttggtggagcaggggtgcccaaggatgaacacccctccaaagctccggtttcgccttcaaatgccgtttctatatcatccagcgggatattgtcaatgctcaacggcttcttgctggcgttgataattagggtaaaatgatcgtcatacaagtagatggattgaacgaatatattgataatcgctttgcgcttattaaaatcatcaaacggcatttcgcacacataatcaagaaaggctaaaatctgcgcttcggtcagcgtgatcttcttgttttcctcgacagcgagctgcgcctccagctccgccttttccgccatgcgcttgttgagtcgatccgtcagcatcaccacagccgcagaggagaaggccgttcatctcggcatcgccgccggggatcctgtgttctggatcgtcagcatcacgcaaacgccggagggcgttcctgtggaatattgccgcaccgtggcaagagcggacaaggtggagctggtcagcgttctccaccgcggagaaagcgaggcatccgatcatgcgtgaaatcagctataaatccccgctttatatccagctgcgcgaggtgatccgcagtaagatcgaagaagaatacttgcccggcacagccataccctcggaaaatcagctgatggagacctatgggctcaaccgggtgtccgttcgcagtgcgctggcggcgctggagtttgagggacttttgaaaagcgtgcagggaaaaggggtttttgtagcggggcccaaggccaagcggaatatggatacgctgggcggttttcacaacaccatgcgccagagcggcggaaacaccgccacacggattctcaacaagacgctgcgtcaggcaggcccctattatgcccgcctgctggagatttcccccgagagcaccatctggtttattcgccgggtagaaaatacggcgggcgagccggtgacgctggaggagctttacattccctacagtgtggtgcccggtctggaggaggtggatataaagctgttctccatctatgacatctatcagtggaacggcatcgtgctgggagagggacatcaaacgctgcgcatcacccggctgccgcctatgctggccaagcacatggacgtgccgccggagcaggcggtaatggagctttcatgcaccacccgggatcggggcggccgggtggtggagttttcccgcagctatgtgcgcaacgataaggcggagtttgtcgtccacttccgtcacacaaatccacaattggtataacttttaatattacaactatcaatacaggcggataaaatgcgttatccgcctgtattttttaccatttgttgttattttagccaaaagtgccggggctgattttagtcgaaacatagaattcacgttttttgccgcaaaaaccgattatcatcttgtaattggtataagttgatactatacttatcacgtcagggcaacacaacgaaaaaaggttgagaggtgggccacttgtccgattccatcgtatcgctgcgccatgtggaaaaatggtatggcaacaaccacgtggtaaaaggcatgaatcttgaaattcatgaaggcgaatttctgacattactggggccgtccggctgcggaaaaaccacaacgctcccgcctttaatttcgattacaagaccaacgtcttcttccagaaggacgtgggcgacgcgctgaccatctacgataaatactatcagatgctgaaggtgggttaatccatcgctgcaaaaatggagggatatccttggttaagtttgatgaacaaaaacaaatcgacagcgtaaacggtgctttggcattgcggccgcaaatcgaagagctgatcgaccgtctgctggcagagggcgtgaaaaacctctgctggctgggcatcggcggcacatgggccagctgtatgcaggtggtatgctatctcaaagagcacaccgacatggataccttcgccaccaacgccgcagagtattgcaccacaggcgataagcgtgtgggcgcgggaacccttgtggttctctcctctgtgaccggcaccaccacggagatcgtggatgcggttcgtctggcccagagccacggcgcaaaggtgttggggttcattgacaagccggatgctgagctggccactctggtggattactgcatcagctacaagggcaatgaacagctgaagttctttatggtggcggactgcttcctgcgccgtcagggcaacttccccgactatgacgcctattatgcccagatggacgcctatctggccaaggatctggtggagatcgagaagattgccgatccctttgcggaggactttgcccgcaagcatctgaaggacaatctccactactttgtgggcgccggttgcctgtatggcgccacctattcctacgccatgtgctactgggaagagatgcactggattcggacgaagtccatccacagtgccgagttcttccacggtatgctggaaatcgtggacaaggatacgccggtcacggtctttgtgggcgaggatgcccagcggcccctgggcctgcgtgtggcgaagttcctgccgcagatttgcgagaacttcaccattatcgacacccatgattatccgctggagggtatcgatgagaagtaccgcggacggatgtgctatgccattatgcacgcggtaaccaatcgcatcgacgcccatgtggaagccatcagcggccacgacatggccattcgtcggtactaccggaagttagcgtattaagtgaaaaagggcgggttcccccgcccttttttcagaggtttgcttatgaaatttgggatgtttaccagcggttatcagcgtctgccgctggaaaaatgctttacagacgctgcgcaactggggtatgattacatagagctttggggcggctatccccacgcctttgccccggatgtgatagaggactatcgggagatccgccgcttgcaggagcattacggcattcccgtgcctgtctatacaccggagcacaatgcctatccctataactatatgctggggacggaaaagcagtggcgcaattgtatggcgtatctggaggtgtctatccatgccgccgggctgatcggcgccgggcagatgctgatttccgtgggacacggcggcgagtgcccggcggaattgcgccgcgcacggctgcgccgctctgtgaagcatcttgcccgcgttgccgaacgggagcatgttgtccttctgctggaaacgctgtcccctctggagagcaacacctgcacacagcttcatgagctcaaggagctgctggaggaggtggactcgccgtggctgatggggatgtgcgatgtggtgccgccggtattgcagggcgaggacccggtggactattgccgccatctgggaagcagaatggcccatttgcatctggtggactgcgatggcgtgacggaaacccatctgatccccggagacggtgtattgaacctgaaacagattgtcagcgacttccggcaagcgggctatgacggccgcgccacgctggagctggtgactcactatatggacgatcctaccggcgccgcaggactggcgctgcaaagagcaaaggagttattatgataaaaattgcgtgcgcaggcgacaactgtgtggattattatgacaacaccggcgagagctttcccggcggaaatccggtcaatgtttcggtgtatgtaaggcgtctgggcggccagtccgcctatctgggcgcggtgggtacggatgattttggaaaacagatgtgcgccgcgctgcaagagaagggcgtagacgtcagccatgtgcagattctgcccggcaaaactgccttcacccatgtagagcgcatcaatggtgagcgggtattcggcgattatgatgagggcgtcatggcggatttcagactccggcaggcggatttcgacttcctcaagggatacaatctgctggtcaccggactgtgggggcatacggaaagtcaactggccgacgttcgcgccatggggatccccgtggcctttgacggggccgagcgcccgctggatgaggcgggcaggatcgcgctgccccatgtgaacgtggcgtttttctcagatgacgcctccgatgaggaaagcctcaaggcgcggattctggagatagcggcgctgggcccccagatcgtggtggccacccgaggcggaaaagggagccttgcctatgacggcgaaagcttctatccgggccagatcgttccgtgctccgtggtggataccatgggcgcgggggacagctttattgccggattcctgatggcgtggctgaaaaaggagtcgatcccggcctgcatgcgtgccggagcggaaaatgcagccgtaacgctgggctatcccggcgcgtggtgataatagctgaagtctttgcaggagctgctggccattgaatcggtggcccggcgggatcaggaaaagcccttcggaaacggcgtggcccaagcgctggattacacgctttccctttgccaacgtatgggctttcatacaaagaacgccaacggctgtacggctatgcggaaatcggcgagggtgcggagatcatcggctgccttggccatctggacgtggtccccgcgggagatggctggcattatccgccttatgccggaaccatagacggcggacggctgtacggccgcggcatatcgggcgctgtttggcagcgacgtgtatggtaaaaagctgggcattgccatgacctctcccgatagcgggccgctgtctatgaatgtgggacttctgagggtggaggacggcctcatccggctttctgtcgatatccgccatccggaaaccgctgccgccgatcatattgccgaaacggtgcgccgcgcagtggagccctacgggttcacccttgcgcccattcacccggaaaaaagcgtttatcaggacaaaaacggccccgtcatgcaaagccttctggcggcctatcggcaggagacgggagacctttccgcgccgcttgccatcggcggcggaacctatgcaaaggccatggagaacattatcgctttcgggcctgtgtttcccggcgaggaatcccgggagcatcaggcggacgaatatatcgccttggacagcatagagaggctgcgccgcatctatgcacaggcgttccaaaacctgctggcattataaggatttatcaaacataatcacgaccatattataattataccatcttcgtgctccagacgcaagttcacagatatgcacgaatcgatattatagtaaaaaagcgccgcctcgggatcactcccaagacgacgcttttctgttgtggatcagagcgaacactttgcggcaaagccgccgctgaagaaataggtgttcgtccaatacctgtttggtggagacggacgggatcgaaccgttgacctcttgaatgccattcaagcgctctcccagctgagctacgcccccgtttggtacttgaagattataacacagacggttacaaatttcaagcccttttttgttttttattgatcttttttcgcaaagcgaaaaatatcgccgtttattcgatgctgtgaatgcggtatgttccgctttcggcagctttgtaagcgaggccatcttcaaagacatagccgctttcaagacgaataacgccgtgcatggtgcttggcagctcaaccgtcaacacaatgacgtcgtcctcatccctctcccatgcggaagcgatgcggcctgcgggtgcaatgtggaacgcttcggcatgtgtgaggcgcgagatgaacgacgggcggaaatccacctcattcggttcaccgtgcggcgccatgcggataccggagagcgcctgcgtaaaccagctgctgatgtcgccccagaagtggtgattcagtgagccgatgcgatcactgccctcgggctgaaacagctcccacagcgtcgtggcgccgcgcgcgatccagttgccgtaggacggataatccgggcgggtaatcatggagaacgcgaggtcgctgtacccgaaatccgtcaaaacatggaacagcacacgtccgccgagcacgccgacatcgaggtgatactcctgctcctcaatgaggttgatgagctgctcaaacgccgccttgcgctctgcgggctcgaagatgttgtagtagatggccatggcctgcgaagtctggcagtttccggcagcgagcatagtgttctcgtcgatgagatacttgcgcacggcagctttccagcgcttagagagcgcgcgggcaaacgccgcctgctccggcatattgagcttatcgaacagaaacgcggctttatccgccatgtcctttgagagcaccgtatcggtgaacgcgagcggcgatttatactcgtgcgcttcgcgtcccggcgggcaccagtcgccaaggccgatggcgagcaggtcgtgctcgtccatacgcgttgtgaggtagtgcaggtatttgatgatcgccggggcgcacagtttggcggaatttaaatcgccgcggtactgatacagtctgtacggcagctcaacgagcacgctgtcccatgcagggccgttgccccaagcaaagccccaaccgcttgtgggtacgatgccgggcagtgcgccgttattatcctgtgctttcacaatggcacgcagccattcgcggtagctcttttctgcaccgaggttcagcaaaatatgttcggaagaaagtgccgcgtcggccgtccagccgtttttctcgcgctgcgggcagtccgtcgggaaataatagaaattcgtcacgtccgattggcgtgtcatttgctgcaatttgtttgcggtctcatccgagcaggagaaactgccgcgctcttcgagcagcgagtgcatctcaagcgctgtaagcaagtcttccgtcgcttgcgcttcggtgatgccgctgacgagcacataacggaaaccgtgatacgtaaacgccggtgtatatacctcttccccgtcgccgcgacaggtatacacgtctttgtggacatattcgagatcgcgcgcccagtgctcacgcttaaaccagatattttccacgtccggcaggccgtccttcaagtgctcgccgtgccgaagttctatgcgctggtcaagctcgccgcgcacgcacaagcggcacacaccggcggtgttgataccgaaatcgtacagatagcccttttccgttttcgtaacggagatgggctttaattcatttacgatgtcgctcggctccgcggtacacaggcgcttttcgccgcgcggctgcggggcgcgttcggcaaattcccatgcactgtcgtcaaatccgatcgtattccagccgggtatttccaagcggccgtcgtaaatttcaccgaagcgatagtcatcaaacagcagcggagacgattccgtacgccacgtttcgtcactttcaatgcagtgtgcctccccgcttttgtccgtgtacgtcaggcacagcgccatttgcggtgcggcacggaatgcagcgatgtcgaaatcccagatatgcccgccggggttattcgtgaagccgttgccaagccacacgccaagcacattttcgcccgcgcggagcgtgacctcatacgtatcgtaatacacaaggtcatcgggattgctgatgtacggcgcaagacgtccctttgtgatgcgttcgccatttaaatacagctcataaaagccgagcgccgtgatgataacgtttgctttagcttcgtgatcggcttgaaatgcgcggcgcagatacggcgcaggcacgtggtgttcaaatgtattgtaagcttcggatgcgcggataaaagacttcggaaattccattttaactcctccaaaaaggactgaattcctcttttatgactgctgtttcgcttttgattcggttgtgggatctacgtagacggtcttatactgcacataaatgaccatgccgggctttgcgccctgcggctttgaaacatagcggatctgcgtgtaatcgaccggcacctgcgcggaatccttcgcgcggctgtgctgcgcggcaagcacggcggcttcctccatggcggtctctgtcggtgctttgccgtctgtgacgagcaccgtgtgcgagccggggatgttcttcgtgtgaaaccaaatatcgttgttgtttgcgtccttcattgtcagcttgtcattctggcggttattgcgcccgacaagcaccgtgaagccgtcgctcgtcttgaacttgagcggtgcggaaagcgcaggctgcttctggttctttttgcccgccctgcggcgcacgtagccctgttcggcaagctcggcgcgaatctcatttaaatcacgttcgttttcggcgagggcaagcgattcgaacacgctgtcgatatacgtcagctccgtctgcgcaaggccgatctgctctgtcagcttttcctccgccgttttcgccttgcggtagtttttatagtatttctgcgcgttctgctgcggcgtgagcgccgggtcgagcgcaatctcaagctccgccaaattttcatcatagaaattttgcagctttacggatgtttcacccttttgaatcgcatacatattcgcactgagcaggtcgcccttgatgcgcagtgtgtcgcgctcggcgcatgcggaaagctctgcctgctggttcgcgatcttgcggctcaaacggtcggcgtgattcgcaagcagacgcagaagatcctgacttttcacgcgcatacgctcaatctggtcgcgctcggcgtagaacgcgtcgagcatttcggaaaagctctttttttcactgaccgtcatcgcgttgccgtactgacgaatgtccataaacgcgaaatctttcggtttattccgcgggtcgatgacaatatgcggcgtgccggaaacgtttttcgccgtctccatcagcgtcgtcacgtacatctccgtacggcggcgctgcgggggcgtcatgcttttcacatacacctcatgccccagccccgcgctattttcgacctcgcgcgcaatgatcggcgaaatgccctgcaaagcggacatcaacgctttggaaagctccatatcacgcggtaaagcatcgatacgcgccatgatctcctccaccgtgcaggtaagcatggaaagcttatcctgcgggggcggcaggcggtataaaagcccaggcaacacaagacgctccgaagacatctcggcatccacgcgttttagtgcatcgatgattttgccgttttcatcaaccaaaatgatattgctgtaccggcccatgatctccacggcaagcgtcagctccacgtggtcgccgagctcgttcacgctgtcgaatttcagcatgagcgcacgctccaagtcgggctgcgtgatctccaaaagctttgcaccctgcaatttcttgcgcaaaagcatgcacagcatcggcggctgctgcgggttttccaccggaatcgtcgtcagattgacgcgcgcactgtttgcacgggcggaaatgagcagcttatatgcggcgctgaagccgcgaaatgcgagaatcagctcatcgcggttcggctgaaacacacggtctacgcgcgtgccgagcaaggacgtgccgatttcctcttttaaatgtcgtaaaaatacaccatccagtgccattttataaaaccatcgcttttaaaaagcgcctttctgttctgtttcaaagcgtttccatcggcgggcgttcgctttcggaaacgataaattccacacccgggcaggctgtgtcaagataagctttcagccgctcgcggtacggcagctccgtgtggtagtgcccggcttcatacaaagccagtcccgcctgctgcgccgcgatggcctcgtgatgcttcacttcgccggtgacgaacgcgtccgcgccctttgcctgcgctgcaagggcatagtctcccccggcaccgccgacgaccgcgactgtgcggagcattttgctgaccgccgtgcagcgcaccgccgaaagccccaacgcttccttaatgtgcgcagcaaagtcctccgttgtcattttttccggcagctcgcccatgtaggcaatgtccgtttcgccctcttttaaaatgccgcagacgttttgcagccccagtttgcggcaaagcgcatcgttcacgccgtagggatatgccatatcgagattcgtgtgcgcactgatgaccgcaatgccgctctgcacaagcgcatagatgatgttctgcggctgcacggtacgcagcgggttaaagatcaccgggtggtggctgatgatgagctccacgccgatgcttttcgcctcacgcagaacgcacggcgtgacatccaagcaaagcaacgtctttgtgacgtcgacattttcatcaccgaccagaataccgacgttatcaaaatccattgccgtttgaaacggcgcaatacggtctatggcgtcatagatctctcgaacggtcatgcgttctcctcctcgccgtacaggtctaaaagcatttgcagcaaaatttccagcgcgctgctgtccgcgccgccgtgccgcatgcccttgatcttattttcgatgttgtgccgcacgcttttggcataacgtgcgctgaacggactgccgggtttgatctgtcccatatataaatcaatcagctttagattatcccgcttttgatcggtatagtacacggacatcacggagtaaattttatcactatctactaccgcttcttcgcggtcaatcgtaaagcccagcgcggcaagtccctctctaagctgcatggcggtcgtcatcggctgcaaaacaaggtgcttatccatcgcgcacagccatggtgcttccgagatgatacgcaaaataagctcaccgcccatgccggcgatgacaatgtcctccgcctcatccggcagcaccccgtgcagaccgtctccacacacaaagtgcattttgtccgccacaccgcagcgcgaagcattgttcatggcgctttccagcggccctttgtgaacatcaaccgcaacggcaaacggtattttaccgctttgcagcaaacagaccggcacatagccgtggtctgtgccgatatcggcaagttttttgccttcccgcacaaaatctgcacatttttgcagacgcgcgccaagggtgggtgctcgttctattctgttttgttccatgagttcctccgaattgccggatcggcgaatttgcttattttgtggcgaagcgcgcgttaaatgccgctgcgaactgctctgcatccataccatgcactgcgcaggcctctgcgactgtttcgccgcgtgcggcgggacattcaatgcaatgcatacccgcttctctgaaaaacgctgcggcatctgcctcccgccgcagaatatcgccgatgatggtatcgaccgtaatgtgcataaaacatccccctttaaagatatttaaccaatttaattatacgatgcataagtttgttttgcaaggtgtatcacggcttccgcgtaaatatcgtaaatatttataaagcaatatttgtctttgaactgcaaaatgcccggcagtctcccgccgggcaccgatatgcgttttaaagcttatctttcttccttcatgcgtgcaaagcactcgctgcaatagaccggacggtcctcacgcggcttgaagggaacggttgcttccttgccgcaggcggcgcagacagccgtgtacatctcacgttccggctttgctgcattcttgcggttctggcggcatgccttgcatctctgcggctcgttctcgaagcccttggatgcgtaaaattcctgctcgccggctgtgaatacaaattctttgccgcattccttgcagatcagggtcttgtcttcgtacatgtgtttttacctcgctttggtcataatagaatagaatgagttttgcccccggcggatttgcaccgcttcattgaaaaacaacgccatcaactgtggaagggcatatacatataaatatatagaaaaggtatccgcgcgaaagtcatcctttggcgtcattgtttttctgccgcagctttttgcgtacacgcgccatcgcgttatcgaacgcacgtgccgaaatgccgagttttctctctgcttcctgccgcttatagccgccaagatacaaagaaagcacacgcagctcaaaatcggaaagtgaaatatggataacagaaagcagccggtccatctcgtcacggctctccaaaagcgtttgcgggtcggaaaggcggtctgccccaaggtcttccatctcctcaatgggcacagcgttattgaggaaagaatttttcagactggagctacgccgcacggcgctgacgattcgattgttgatgcaccgcccggcatacgtttcaaacgacgtcctttcgctcggcttataggaattcgccgcgtctaaaagccccaaaagcccctcctggtacagatcttcccgctcaagggaaaaaatctcgcgaaaactgcacgccttgatgcggatgaccttcaggtagcgcgccgcaagctccgaaaacgccgcgtcatctccgttttgaaaacgaagtgccagcgcctcatcgctgagcggtatactatttttctgcccggtttcctgcatgagaacgctccaaatgactactgtttctttatcatactccaaacccttacagaagtcaagacaaatcttcctatactgtacaaaaatgctcgaccgaatttttacatttatatctatcctgcaagcttaaacttctattgccaaaattcgataaaaagtatataatgcagacaagaactgcgaaaggcggtaaaaatatggtatcaaaagcattcagcatgggacttttcggcatgcacgcgttcaaagtggaagtggaatgtgacctttctgccggtctgcctgcctttgaccttgtcggcctgccggacgccgccgtaaaggaatcgcgcaatcgcgtgcgcgccgcactgaaaaactgcgggttcgatttccccgtcagccgcatcacgatgaaccttgcccctgccgacgtgcgcaaagagggccccgtttacgacctgccgctgctcatcgctttattgaaagccaccggccagctgaatgtcaacacggacgactgcatttttgcgggcgagctttcgctttccggtgcgctgcatcctgtgcgcggtgtactctccatggcgatagaagccggaaagctcggctacacgcgcatgtttgtgcctgcggaaaacgcctatgaagccgccgttgtgaccgggctttcggtctaccctgtgccggacgtgttcacactcatcgaccatctgcgcggtacaaagccgatcctgcccgccgcgccgtaccacaacgatccgaaaaatcagccgccgctgccggacttcgccgatgtaaaagggcaggcacaggcaaagcgcgctttagagattgccgcaagcggcgggcacaacgtgttactcatcggctcgcccggttccggcaaaagcatgcttgcaaagcgcctgccgtccattctgccgcaaatgtgctttgaggaaatgatcgaaacgaccgaaattcactccgttgcgggacttctgccgagcaacaccgcgctcattgaaacgcgccccttccgctcgccgcaccataccatctccggcccggggctttcgggcggcgggtctatcccccgccccggcgagatctccctcgcacacaacggcgtgctgtttttggatgagctgccggagttttcgcgcagctccatggagacgctgcgccagccgcttgaggacggcgttgtgaccgtctcgcgcgtgaacggcacggtctctttcccgtgtaaatttatgctcgtcgccgccatgaacccctgcccatgcggctattacggtcaccccacacgcccgtgcacctgctcagagaccgccgtggcgcggtacctcggccgcgtttccgggccactgctcgaccgtatcgacctgcacattgaagtgccgccggtcgattttcgcgacctctcgaacaccgcaaaggaggaaagctccgcgtccatcaaagcgcgtgtggatgccgcacgggatattcaaaacaagcgttttgcgaacaccggcatcacctgcaatgcgcagattccgccggaaatgctgcatgaagtctgccgcaccgcgcctgctgccgatgccctgctgaaaaacgcatttgaaaaattcgggctttccgcccgtgcctacgaccgtgtgctaaaggtttcgcgcaccattgccgacctcgataacagccgcgacatcgaagcgcgccatgccgccgaggccgtgcgctaccgcacgctcgaccgcaaatactggacgagatagaattatacaaactaaaaagcagttcttcctcacggaggtcacatcgcgtcagctgtgaaaattctgtcgtttacttcaatactccgcttccttgtttttttccgttcatcccgaaatttccttcaaaagcgcggtgcagccttcataaacatcgcgccaggtctcttcaaaatcgccggtgtaccacgggtcagccacgtctccgggacgattggtgtgctccatcagcaacgagaatttatgctccgggtcacctccgcaaatacgctgcatgccgcgcagattggaactgtccatgccgatgatgtagtcgaatttatcataatccgcacgcgtcatctggcgcgccgcatggccgtcgcagcgaatgccgtgttccaaaagcttgcgctgtgcgggcggatacaccgggttgccgagttcctctcggctcaccgccgccgaagcaatctcaaatgcgcattttttccccgctttcgtcacaaggtctttcatcacaaactccgccatcgggctgcggcagatattgccgtggcaaataaataagatttttgtcatttttgttcccctatcttcattttgactgtaccactattttaccatattcccgtttcattttccagtgtaaacagaagccgccgtgcgcgctcacatttccgaaacctacgccgccattatgcggttgatttcggagtggtctttccccacaaaaaagcagctgctccttgttaaaaagagcagctgcttttctatgggatttgagtgaaaacttgtaagcaaattaagaatcaagaatgttatgaattccttgctgaacggtttcgtaatccttttttaaagacgccaaccgttcccgcccggcgttttcaatatgatagatcacacgcatgcgggaacgccccgtgctcatgcgcgttacgacctcctcgccggtgatgtacccatcatccgccaagcggtacagaagcggataaaaagacccctcctgcactgtaatgaaacctttgcttcgctccttgattttctgcacaagctggtagccgtatgcgtcttcttcacacagcaaaaacagcgtgagcatttctatggagccttttttcatggtatcaatagccatagtggagatacctcctgtcaagtaatagattacagtaaaacgatttataagtcaatacctattttcaataaagtgtattaacaagcaaactttcatgtgctatgatgacagcacgcagaacatgcgcaatttatactgttttaaagatttatatatcggcattattgtcttagttgtcaagcggcgcggcttcttcgggcacgtcttctgcttcggcttcaacgggcagcaccgcaagcaaatcgagcaaaaaggcggtgatcgtgccggacggcttcatcgagaacctcaatgcgcagcccatcctaaacaaaaagtaacgcaaaagaattaaaaggctctgccgcgcaccgatttgatgccgacaaagcctttttctcgttttagggtgttaaatgaatctgaaatacatgcctgcactgccataattgcagtagtgctcgtccgtcgacatgacatcagccttgctgatctctcccgtgatcagtttttcgcacagcactaccatatcctgcacgatctcgagccgcagcgggttatagtagaccgacctgctcgcaaggtaatcctgctggtgctgctcgtcgcagccgttttcctgaatggaatgcccgccgaaccacgcataatcgcgcagcgcctccgcacgcggcaggaagcactcaaggttctttttgtagctctccaagaccttatacatgtctttttccgggcagatcatcaaaacgatatacccggagccgatggcgtcgccggtaaaaagcgccttgtagtgtgcgcacgcgaacaccacggagttttccgtgtgcccgccgagattcagcacatccaccgtcacaccgccgccgaggtcgatcacgctgccctcgtcaataggtacaaagtgcgggtatttgccgccgtcggaaagcgccgccgcaaaacagttttcgtcttcgcggatcttctccacatcatttttgtgcagatatactttttcaaatcggtcgatgcggaacatgtggtcgcggtgcgggtgcgtaatcgcaacctcgaccggcagccgcgtcagcttcttcacggtgtcgagcaggtcgccctcgcccatgcccgtgtcgatcaaaagcgccttgtccctgccctcaatgaggtagcacgtcgccgtaaagtagtcatctatccgccaaaaaccgggctttatccacgtcacttcaagctgcgtgcgtctatcctgctttagcagccaacgaacaatttccccgtccgcaaagacattttcccatgcgttttcagggttgatctccgtgcgctccaccgtttcggagcctgttacgcgcaggctcatcacaagcttttccgcgtctgcaagcaccttgccgtctgcgagcacattgccctcacccgcgaatgtatacaccttcaggggcatgaattttgccgcgcgtacttcataggggtctgcgtgcccgccgagaatcgccgccgcgctgaagaaatgcgacaaatgcgaaatcaactgccacgccgcgtccgcgcagctttgcgatgccgtgagcgacaatttacatttgtcgatgatgcccgtcgtctgccattcaaaaaccaagctctgcaccgctgtttcgggcaatataccgcccggtaaaatcaacacagttacctgtgattctccgcaatgcggctcgagtttacttaaacagctttccgcctccgtctcattcgagacaagacacagcagcgtcgactttccgccgcccagctccgcgccgttcatgcaccacttgagcacctgtccgttaaacactttttcaaaataacgcataccttttcctccccgttacaatgacccgctattttgtgaataaaacaaaaagactccacatttctgcaaagtctttcatggtcgaggtgagaggatttgaacctccggcttctacgtcccgaacgtagcgctctaccaagctgagccacacctcgatataagccttgaatactcaaggccatttggcagcggtaccaggatttgaacccagacaaacagagtcagagtctgctgtgctaccattacacaataccgctatctgtttcgctgtctttctttcgtttcgtttgtttccgtcggacaacgtagactattatagcagatattcgggaaaagtcaacccttttttcaaaaaaactttaaaaatttgaaatttatttttcgagtgagaattaaaacgcgtaaaaaagcgcggaattatgcggttttttgccttttcagccgtttacgggctctgccaaaaaacacgcgccgaatgccttcggcacacgctttgcggcattttccgccaagcttttttcagaaaaaattccaaaaaccgcggagccgctgccggtcatcaacgcatttaacgccccgttttcgcacagatatttttttatctcctgcacaacggagatttgcagcgcgtcgtcaaaccgatttccgagcgcgtttgcaatttcctcaatcgagcgatgctctaccgcgcgcaccatacccggcgtgtagcgcatgccgccgtccggcacgttatcgcacgcacggtacgcttccggcgtgctcacgcccacgtccggcttcacaacgacaaggtaacacttcggtatctctgccagcggcagcaactgctcaccaatgccaaggcagcgatatgtgccgtttaaaatgcagaacggcacatctgcaccgatgcgcaaaccgagatacaaaagctctgccgtattgagcggctcctcccccgcttctgcgcacagatgattcaataatttcagcacggctgctgcatccgcactgccgccgcccatgcccgcctgatccgggatatgcttttcaatataaatatctgcgccgaacggcacaccggtagcgtcaaaataatactgcgcagccttgtatgccgtgttgcgcccgtcgcacgggatgtgcggcttcgagcactggagtataacctcccccgtatcattcagcgtcacgcgcacacggtcgcagagagacacggattgcatcaccatgtcgaccgtgtggtagccgtcctcgcgccgcccggtaatatcgagcgataagttgatttttgcatacgcattacattcggctgtgttcatattcagtcctccctcataggtcaaacagtgaaaaccgcttgatattgatgacatgcttcgggcacatttcgtggcagcagaagcaatggatgcacttgctgtactcgatgtgcgccttgtgctcccgcaccgttatggtatgctgcgggcagctttccgcgcacttgccgcagcccacgcactgtgccgtgttgatcttcggatacggcgttaaaattctctttgcaagcggctgcatgaacttcggaacgcgtgtcgtaaaatcgatgctgctggagcgtgcacgcttaaaatcgtgtacgacaatattctcaaaatcgtcaccaagcacttcgatctccgaaagttttcccgcacaaagtctgcgctcctgtgcgtttttgagcaccaaaatttcttcgggcttcatatcgatgagcttcgcgccgaccatatccgcttcgtagggactttcagaccccacaagtgcgccgacaaagcgtttttggccgcccgtaggtccatcgccctccatggcgtctatcgcatctataatcgagaaatccggatgcacatattcgcacaaatcgacgagcatttccgcaaacggctctttttccgggtaacggctatgcagctccggctttaatagccccggcaccacaccgaagagattcttcaccgcgccggaatagcccatcatgccatgggtctttaacttcgcaatgtcgatgacgagcgtctcgcgcggccgcgcgaacagctctgtgacggtcagcgtattgcagcgctttccctccggcagctgcactgccgtgctcttacacgctgtatataacgaaaagccgtatttttccgccgcttccgtatagctgcacgcgcggaacgtgcctttcatgatagacgtattgtacggcccgccgccgctttccgccaccagcacgtccgcgccctgccgcagcaggcaaatcgcaaccgcagccgtcacattcgggtgcgtgatgatggcctcttccggcgcagagcgcatgacgagattcggcttcaaaataacggtcatatgcggttttatgcggccataaaacgccgaagcggtgaacattgcatccaccgcttcggtcagccgttctatgtcataatccgcaagccgctttacatacgcgctcactttaactccttcaaaaatgcgccgatgcggttcagcgcctctgcaaggtgcttgatggaatacgcatacgaaatgcgtacaaagccctcgccgcacgcaccgaatgccgagcccggcaccaccgcgacatgcttgtcgtaaatgagacgctcacaaaattcatcggacgtcatcccggtggactgaatggacgggaacacgtaaaacgcgccctccggctcaaagcaggtaaggccgagacggttgagcccatccacaatcaaacggcggcgcatgtcgtactggtcgcgcatttcggcaatgtcgtcatcaccgtttttcagcgcttcgattgccgcgtactgtgacatcgtcggggcactcataatgccgtactggtgcagcttcgtcatcggggaaatcatctccttcgggcccgccgcgtagcccatgcgccaacccgtcatcgcatatgtcttcgagaagccgttgatgacgatggtgcgctccttcatgcccggcagcgacgcaatggagacgtgcggctcgccgccgtaagtcagctcactgtaaatctcatcggaaagcacgatgaggtcatggcgaatgatcacttcgctcagcgctttcaaatgctcgcggcgcatcacagcacccgtggggttattcggatacgggaaaataagcaccttcgtcttgtccgtaatggcgttttcaagttcttcgggcgtcaagcggaattcgttttccgctttcgttgcgatggaaaccggcacgccgcccgccatacgggtcagcgggtcgtagcacacaaagcacggctccgggataataacctcgtcgccctcgcccacaaggcagcgcagcgccatatcgatagcctcgctgccgccaacggtgacaagaatatcggtagctgcggtgtattccaggtcatatttgcgctttaaaaagcggcagatctcctcgcgcagcgccatcaggccgcggttcggggtgtagcgcgttctgcccttttccagcgtcgtgataccctcctcgcggatatgccacggggtgaaaaaatccggctcgccaatggaaagggagatcacgtcctccatttcgtttgcaatgtcaaaaaagcggcggataccggagggcttaatcacgcgcgcacggtcgttcaggtatttgctgtaatcaatcacaaaggttgcttcctctctcgtcaatctcatcgtagtcggtgacaaagtccacgccgccgtccttatatttcgtcagaataaagtgcgtggcagtggagagcacaccgtcgatcggcgcgaggcgctttgcaacgaacatcgcgatctcagacatggtattcgccgtaacggttacggcaaggtcaaagccgccggacatcaggcagacgctttccacctcggggaaggcctttacgcgtgcggcaagctcatcaaagccggagtccttcttcggcgtaacgcgcagttcaatgagtgcacttgcgcggtgcacatctgtacgctcccagttgatgagcgtgcggtagcccttgatgacgccgtctttttcaaacttatgaatggcggccgccacttcggcttcggtcatatccagcataacggcaagctcctgcacggtcagcttggcatcatcctgcaagagctttaaaagcttttccattttcttatccatggtgttttatcccttctgtttttattttataaggcctgctgtaccttttgcagcaggcagtgtaatctgttttattcgatcggcacctgcaccggcttgcgctctacaaacacggtgtattccttgtagccgatgtcgctcaaaagctccatggcttcctctacgccgcttgcaatgttctccgtgcggtgtgcatccgcgccgatggtgacaagcttaccgccaagctccttatagcgcgaatagacttcgcggtcgggcagcttcggcgcatccgtgcgcaaaatacgggaggtgttgaactccagcgcgatgtccgacttgatgagcgcctttaaaaccgcgtccagctcgtcctgatacggcttgtagctgggcgtttcccccgccttacacatgtagcgcagcgggtaggtgatgtgcgccagtgtatcgaacttgccccactccaccatttcaaggctctccgcaaagtaggcgtgcaaagcgttgtcgatctcctgctcggtgggattatgctcgccgatgtggtaaaaatcgtcgtgatcgcgaatgttgtgcagcgaaccgattaccacgtcgtagtcgcgccccgtaagcgcatcgtgtgctgcgtttaggtcctgcagaggctggccgagctcaatgccgcgcaaaagcttcaaattcgggaaacgttcctgattttgcaacagctccgcataggactgacgtacgacatcgtaataccgtccgccgggaatgtgcggcacgttcatgtactggttgcactcgcaatggtcggtcacggcgtagtaaaccagacccatctcgatggcgttcatgcacatatcgcgcatgttgcgggtgccatcgaacgagcagttggaatggctgtgacaatcggatatatttttgtaacgcaaaagatcatccccttaaagcacttcgacctgtatgctcaaaacaatatacaaattgattttaacacaataaaaatcattttggaatacccaaagcacaagttttgcaacttttcgcctaaaaacgcattgtaaagcgatgtgaaagtttcttccgatttccccgcaccgtacctttttgatttttacaccgctatttcccgcaaaacaccttttaaaccttgacagcgccccacatttgatagataataaagaaatagaaaaccacagcaaagcgcttttatgttttgcaggaaagggtagggtcattttatgaaagcagtcattaccgtaatcggaaaagatatggtcggcattctcgcgaaagtctccaccgtatgcgcagaaaaaggcatcaatgtcattgaagtcacacagtccatcttgcaggatatgttcgccatgatcatgatcgtagacatcagtgctgcgaccgtgccgatcagcgagctctccgatgaattcgatacgcttggcgaaaagctcggtctgaagatccatgttatgcacgaggacgttttcaactccatgcacagaatctaaatctattaccgaaaggccgggaatgaaactatgatcgatacacatgatattctggaaaccataaatatgatcgataacgagaacctcgatgtgcgcaccatcacgatgggcatttcgcttctcgactgcatcgattccgatattgataaggcctgcacgaaggtctacgacaaaatttgcagctatgccgaaaacctcgtcaagaccggcgaggacatcagccgcgagtacggcattccgattgtgaataagcgcatcgccgtcacgcccatcgccatgctggcgggcgcaaaccccggtgcaagccccgctcgctttgcaaaggcactggaccgcgccgcaaagaccgtcggcgtcaacttcattggcggctattccgcgctcgtgcataagggctttgcccccggcgattacgctttaattgaaagcatcccggaagcacttgcggaaacggaattcgtttgctcctccgtcaatatcggctctacaaaggccggcatcaacatggatgccgtaaagaaaatgggtcacatcgtcaaggaagccgccgtccgcaccgcggaccgcgactgcatcggtgcggcaaagctcgtcgtgttctgcaacgcaccggaggacaaccccttcatggcgggcgctttccacggcgccggcgagccggactgcgtcatcaacgtgggcgtttccggcccgggcgttgtgcgcgcagccatcaagaaggcaaaagataccgataatatcaccgagatcgcggacatcatcaagaagaccgcattcaaaatcacgcgcatgggtcagctcgtcgcgcaggaggcttcccgccgtctgtgcgtgccgttcggtattgtcgacctctcccttgcccccacaccggccatcggcgacagcgtagcggatatccttgagggcatgggccttgcgcagtgcggcgcacacggcaccacggctgcactagctctgctcaacgacgctgtgaaaaagggcggcgtcatggcgtcctcacacgttggcggcctttccggcgcgttcatcccggtcagtgaagacgccggcatgatcgccgcagcaaagagcggcgcgctttccatcacaaagcttgaagccatgacggcggtctgctccgtcggcctcgatatgatctgcgttccgggcgacatcaccccggagattatttccggcatcatcgcggacgaagctgccatcggcatggtcaactccaagacgaccgccgtacgcctcattccggccatcggcaagaaggtcggcgaagaactgaacttcggcggcctgctcggctgcggccctgttatggaagtcaatacgaattccccggccgtgttcgtcaaccgcggcggccgtatccctgccccgctgcagagccttaaaaactaaaaaacataaaattcagtttttcgttcatactatcctcggtgagcaaagcgttttgcctttgttctccgaggattttttatcgcctgcgttcgattttcgccatcggtcgggtgcaggcaaatgcaaaaaggagcagagtatatgctggacgtcatcgctttgattttgacggtgatcggcggcatcaactggggcctcatcggcattttccagtttgatctcgtcgcatggcttttcggcggacagggcgccattttgagccgcatcatctacacactcgtcggcatcgccgccgtatggtgcatttccctcctgttcagggacaatgacctcattgaaaagtaaatgcaccgcaaaaagccgagacacttcgttttgaagcgcctcggcttttgttgttatatacgtcggttaaaagttctgtctgaaatacgcacatgcgccgagcaggccggcgttattgccgagtgcagcggcctccacctccaggtcttttgcgaactgttccatcgcgccgttcaagatcttctcgcgaagcgggcggataaaatgttcgtcttcccttgaaataccgccgccgatgagcaccatttccgggttgaaaatgtgcacaagaccgatgattccaaatgcgatgctgtcaatccagctgttcaccgtcgcgctgacgtctgcgtcatcgaggtggtcaaaaatcaccttgccgttgacgtcttctgccggtacgcccagcttttcgagcaatgcagcattctccgtaaaacagcgcacaagcgcgcccgtagaaccgtagcgctcaaagcagccgcggttgccgcacgggcactccacaccgtcaaaattgatgatataatgcccgatttcgccaccgatgccgcgtctgccctgaatgaggcgaccgttttcgataatgccgccgccaatgccggtgccgaccgtaacgacaagcacgttctccttgccctttgcgcgaccaaacgtctgctcgccgagcgccgctgcgttcgcgtcgttgatgacggttacaggcagatgaaaccggtcttccagaattttcttcaccgggctgccgagccagtcgccgagctgtgcacccacgccaataaccgtgccggagttcacatcaatctgccccgttgccgaaacgccgatgccctcgattttcacggggcttttttcgagaacttctcccgcaaggttcgcaaccgtcgtcataatcgacgttttgtagccgtcaaagctgacgctgcgcgtttcggaaagcagaactttgccgttttcgtccacaacgccgatcttcacagccgtgccgccgatatcaatgcctaaaagcgtactcatgaaatggcctcaacaaatctgcgggtgatgtcacgcgggcgtgtgatggccgtgccgataaccgctgcgtgcaccgggtaagagaacaccttctgcagctggccgcgctcccaaacaccgccctccgcgatgaccggcacgttcagctccgtcgtgatgcgggaaagcaggtcatagttcgggatagccgtgcccttcgtctttgccgtgtagccgcacagcgtcgtgccgacaaggtcaaagccgatctccgccgcgtgcttgcagtcttcatagcaagagcagtctgccataaagagctgattcgggtactttgcgcgcgcttccttgaacagcgtgtcaagatcaaggccgttcgggcgcggacggtctgttgcgtccagcgcgatgatctccacgccggttgccgccagtgcatcgatctccttcatcgtcggcgtgatatatacatcactgtcgtcatatacgctcttgatgatgccgatgaccggcaggtcaacttcctttttgatgtccacaatatcctcgcaggtattggcacgaatacccacagcaccgccctcttttgcggcaaatgcaaggtggcccataaagtggtagccgtaaagcggctcatccggcagcgcctggcaagagacaattacgccgcggtgaatctggtttaaaatttcctgatttgtcataaaaacgcgtcctttcgtttttgaaaacattctgtatctctatcttagtccgctttgtacgttgccttgagcccaatttcaaacatacggctccacggcaggaaaatatcttccacggttactttgtccgcaacggacgtcatttccgtctttacaaacttgcgcagctcctccaaaacggcgttggccgccttgccgcgctgctcttcgcaccagaagtacgtcatgccccactgtggcagaatgtgctccgtcacgtagctgcgcacgaccgcaccgtagccgaagtcctcgataaaacgctccacaaggaagttctgcttcgcttcggtattattctggtacatattgttcacaatcatcgcgagcaccgtgcccatggaatttgcagaggtgttccagcctgcataacctgcaagcttcatcaaaataccctgcttattgagcacgcgcagaagctgcaattcgccgccgttcgtgtaggcattgtcgaggatcgccgtcggaatgccgcgcttcaagcaatcgttcacaaagtacagaaactctgccatattgcgctccacatcatagttgatgttgttcgccggctgatttgcggcttcttccatctcgtttgccggagcggtgatgcccatcacaacgtcggcgtcggcgagcgacggcacagcgatgcagcccgccgccatgacgtggtactttacggtctcattgagacttctgtcctcgtagttcgggatcagctgcggcgccagcgtggacgcatacttgaggtatacgcgtggggtgttattctcgagcgcgttgatggcgcgggaaacgagcaccatgccgagctcatcggcacccgggtacaagatcacacggtcattgagcaccttctcgtcgatcttcgcgcgcacggtcttctggtccattgcggtgtaaccgtactttgcggaatcgtcctgcgggatgatgagaaaatcaatcgtgccgtcctccacaaggtcgagcgtgcggatattgaagctgccgttaaacgcgcggcggtcaagatagtctttaagcgccgcggggtctaccttggctttcaactcagaaagctcgtccgcgtcacccatgccgagcttttcgaggtgcgtcagacggccaatatggtgaatctctttgccgtaaagctcatagtaatccggctcctcatcgtcggaggaatatttcgggcagcgcatgatgcactggaacgcgtacagctttacctgcgggttcttttcgcgcagttcttttaaaagcatcagacgctccaaaaccgtctcctcggaaagatggtgcaagcgcgagggaatcaagccgccgtacagcagcgtatcgatggaaatgaccgccgcgtctgccttttcgatatttgcgagcaggaaatcgcggatgaattcataagacgccggggtcttcttctggccaagatgctccgggcgaatgatcgtatacttttcgccgttgaaaattttggacgggaaatcaaagttgcagggacgctcgtcgagcggcagcaaaataatatttttcatggtaatctccttttacgcgtggatgatcttccacgcacgtgtgttgatgttctccagcttcacgtccgcaccgccgccgatgtacaggccgcagtcctccggcacttcaaaatcgaccctgccgggtgcgaagtcaaacacattgcccttgagcggcaggttcttagacggcttacgggtgaagtcaatgtttctgagctccacttcgcggatgttgccgtccacgccgtaaatgcccatggcgttctcgcccatgcaggtcacgccgtcaatgtgcacgttgcggatggcgcagtcggtctcgcggtgtgggtcctgccctgccgggatatggtaatcgtgctttacagccatcatgaagatcggctcgccgttgccccaccagttgccggcgcgtacacgcgtgtcaacaatcatgttgctgatgcgcacattctccacaagtgcggacgtatcgttgcacatgaagcagatgccgcggttgctctccttgatgatacagttcgtgatgatcacgttgcggatatggctgtaactgtagccgatgacaattgccttcgagcaggaacgcagcacgcagttcgtgatgacgatgtcctcgcacggttttgcccaatccgtaatgccggaaagcgcaatgcagtcgtcgccgctcgaaatatggcaattggcaataataacacctttacagctcgcaatatggatgccatcgtcgttcggcacgttgaggctggtgtcaatcgtaaggccaagcagctttacactctcacacgcgttgaagctgaacgtccagcacggcgcgtcgataaccttaatgccgcgcacagtaacattctttgcattgtggaagaagatgcactggctcgggcgcgtgccgatggggtatgtgcattcggcttcctgctcctctgtgaacggaacacgactgctcggtacgttcatcacgcttgtatcataaaacgatgtgccggaaaggtcaatggtgccgctgccgtcgatagtcacattgtcgtggtcacggttgataagcagggcacgcagcacccccatttcattgtggataaaatcctgtacagggtagtcgtcgatattcgtggagccctttaaaacagcgcccggctccaaatgcaacgatgcaccattcagattgattgtaccggtaatgaacacgccgccgggaacgagcacggtctcgcccgtctcccctgcgcgatccacagccgcctgaattgcttttgtgttgacggtcttgccgtcagccaccgcaccgaaatctctgatatttaacattatctctttccccaattctcttcagagttcatattttctgcaccgatatattcggtgtaacagacatcttaaatcaatttcaagtttaaagagtaagaataatgaagcaagggcgcaggaccttttgcgtcctgcgccctgcattcagatcattattcaggtttcagaagagcaattagccttccgtggtgccctttgcgatctcgagtacgttcgggttagcatccagataagccttgaactgggttctgtactcttccaagtacttgtcgaggccagcagccttcagcttctcgatagcagcatcgatgttgtcctcataggaaaccataccgaccttaatcgggtagatggaggagatgatctcggtctggaggttcgtcagctcactggtaacgttagaggaatcaaagatgaaacctgcagccggggaaatgacgtagttatcagacttgtaggtcatgtaatcgacctgctcgtccggcgtatcggtagcataagccatgtacggcaggtagccggtcatccaggtatccatgctgtacagagggttgccgtcgtcgcccttgacctgctcaattctgtggtcgccggtcttggtatagtgcgtgccctcaatgccatagtggaagaggtcatggttctcttcggaagcatacagccagttgaggaacttgaggccggattccggatcctcagaagtggaagaaatcgcattcaggttctgcacataggtgtagatcatgtccgggacgtcatcgccaaaagcttcaacccacttgacttctgcgccttcaacaccgttcttctgcatcgtaacacccgtgtacgggtcgaatgtctgggacggaagcattgcgccgtaattagcatcgtcgtactgcttctggtggtcgcggtttaagatatccgggtcgatgagaccggcctgatacatctcgtagtaggtgtttgcgtccttcttgaattcttcggactcatagaaggaatcaaccgtgccgtcctgacggatgaggcagatgccgagggagttctcaacatagaacggataggtatcatagcttctgtggagccagtgcgccgtatcctgaacctgatggaaccaagaataagccttcataccggtctcgttgaggatctcgtcctgagacttcttcatgaggtcgatgatgccttccgtcgtgtccgggaactcgtcgtagccgaccttctcagcgatgtcggaacggtagtccatgtaggacatcgtgttgtcgaaggatctccagtagcacggtactgcgtactcttcgcccttgtagagggtgcccagccactcggtctcggagaacttgttgtagaggtccgggtagttctggatggaatcgtggatagaggagatagcgcccatacctgcgatagcggaaaggttcttaacgtcctgcataacatgcagcagctcgaactcttcaccggtcgtcagcatgaggttcagcttctcagcataagcatcccacgggattcttgtgacggaaacctcaatgtttacgccgtcttccttcagtttctcgttgacagcagccataccggtctcatagtccgggcaaagtgtgcccggctgtacaatacgcatcgggtgaatggtgccgtcgtcctctgttgccgaagattcgtcagatgtggaagcatcggacgaagtagaagcctcagaggaagcagaagatgtgctgtcagcactggaagtgtcgttgttgccggagcaacctgcaaaagccgtaacgaccattgcagctgccagagccattgccagcagtttcttcgttgtcttcatttcttacttcaactccttgaaaattgatatatgtgtaaccgtcttccacggtaaacaccgaattaaaatgtttgcgggcgattaacccttaacagcgccgacgaccatgcccttaacaaagtacttctgtaagaacggatacagaatgatgatcgggcccatggtgataacggaggtcgccatcttaaagctttccttcggcgggtttacgttgaccgtagcgccggcagtgagcttgctcagtgcagtaatctgagactgaatcttgaagaggagcatttgcaaagagtagtacttctcatcatttacgagcataactgcgttaaagtagttgttccagtagccaatggcatagaacagagcaatcgtagccagaaccggcatgcaaagcgggaagtaaatgccgaatgcaatcttcacttcgcctgcaccgtcaatctttgcggattcgttcagctcggccgggataccgcgcacaaagttgcgcacaaggaacatattaaagggattgaacaacaggctcggtacgatgagtgcccagatgttatcgtagcagttcaatgctttacacatcatgtaccacggaacaaggcccgcagagaaaaccatggtgatgtagaagtaaagggacagaccgtctctgtaacggcaggaacggtttgcaagggtgtagcctgcgccgaatgtgacgaacgatgcaacgacggtaccgacaaccgttgcaatcgtcgttacaaggtaggactgcggaacggatgaggacggcaggaagagcattttataggctgcagccgaccattcgctcggccagaaagagtaaccgttgatcgtaatcgatttctcactgctgaaagaaacaatgataacgagaacaaacggcaggacgcatatcaatgcgaacagagcaacgatgagataaatgacgaatgtaccgacgttctcccccgtgctgtgcttgattttgttgttggtgttagacggctttgtcgccgccgcaaccgtgctgttcatgagcttgtctcctttccctgtatcagaacagtgcgccatccgggaactttcttctgacgatccagtttgctgtgaagaccagaatgaagccgacgatggactgatagagaccgatagccatggaaaggctcggatcacctgtgttcttaaatgtacggtaaacgtatgtatcaataacttctgcaatcggcatcaacgagctgttgtcgcggatgatcgcatacagcataccgaagtcgccgtagaagatgcggccgacagacatcagggtcatgatgcagatggtcggtgcaagcagcgggatcgtgatgtaaatgatacgcttaaagcgcgtagcgccgtcgatataagctgcttcgtaaaggccttcgtcaatgccggtgatcgctgcgaggtaaacgatcgtgttgtagcccgtgttcttccaaatgttgaggatcagaagaatcgggtaccagtagccgggggtggaataataattgatgcgcgtacccatcagattgttgagcaggcccgtctctgtaccaaggataccctgcagcatgtagctgacgataacccaggaaataaagtacgggaaaagcatcatggactgagaaaccttaagaaacttcttcgccttaacctcattgaggacgattgccaaaacaatggagcaaaccgtaccgacgatgaggaacagaatgttgatgacgagcgtgttgcgcgtaacggtccacgcccagctggacttgaagaagtattcgaagtttttcagaccgacaaacgggctaaaaacacccgtcttgtagttgaacttctcaaatgcaattacgatgtacggcagtgtcaaataagaaaagatgaaagtgtaaacgaccgcgggcagcgcaagcaggtacaaaaacttgtttgtccacagctctttaaaaggattcactctcttcttgctgacatcaaccaaagctgacgccttactcatgtttgcgatcatcctctccgaataatgtgtctcttctatataatataaggaagagttttgttcacctctgcgcagccgcacatataaagtaaagcttatttgctttatatttatatattgactctgcaaatgcgaacccggaatatcgctattcctgctgaaaacaaagtgccgacaaaacttggtgtttgccaaagcgtgtcgttttgcaatcacagcgcaccgggcgccctccctcatgggtcttcccggaacctctgccccgtgcagagataccgtttctgcaatccgcttgtttgttttcgatgaataaactttaacacgttgtgaacgatttgtaaagtattctttttgcgataaactccaaaatttcaaagcaactttgcattttggcagttttaaggcacttcacaaatttcgcttttctccattttttgagaatcaaatcacttttttcggcttttcgtgatatgaaactacggttttttacgatttgaatcaataatctgatttttcgcttgcgtttagtgccaaaatccgttatcatagagttatacgaaatctaaatcgtgtttttcgttctctttttgtatttggagtgttgtattttgtttaaaaaagtaaaaacccggctgttcaaccggtaccttttcagcattttctgcgtggtggccatagccgttatactcgtcacgcttttaattttcaccatctacgcaaatttgcaggtcagctctgcgcgcacctattctgtgcatcagttggagcaggtctgtcagatgacggatatgctctacagccaagtgcattccgttaataatcaaattttgcagaacagcaatacgaaccgttgcctctcctccaataccttcaaccgcctcatcgaagccgacgcaggcatcaagttacgcgagatccaaacggcgcagagctatacgcgctatgttagcctctataactccgcctccaaccgtttcgtctccagctctacggcagattttctcacggatgacgatattgcatactattatcgtagattgcccgataatcccggcgccgatacctgccttctgcgcatgatcggtgcaaactacgccacacagcagctcaagacccgttatgtctattccttcgtcttccgcgtacagctacgcaaaggcggctcgcccgacctcatcatcgtagacgtggacgaagattatttcaacgattccatatcgaacctgcgcacctcgaacggctttcaacaggtcctgcttttgaaccgttacggcgaggttttctccaccaatatcgctgaaggtgattcagaaaccttcacgcatgcaaaacccgacaatactattgtctccgtggaggatttcccggagctgaccgacaattccggctctttttcctacacctgcgctgaccataccgaagcgctcgtcacctacgccaaggcgtcttcctccggctttacgatcttcaatattgtgccgtactcgaatatttacagcggtctcccccagctcgccatcatcacgttactcgccggcattcttgtgctctgcgtcggcatgttcatctcgttccgcaccagtgcaaagctctctgcgccaatcgaagtgctatacagcaactacgtcaaaaagccgtcgaacgaccatgccggcgatgagctcgaccagctcagcaaggccttttccgatatgtacatgaaagccgataagctggagcaaggcctcatctcctcctattccgattccaaaaagcgcaacattcagcgacttatgcacggcgagtatggacagattccgaattacatcgaagtataccaaagctacggcatcgacctcaccgcgccgtattacaccatcgtcattatcagtgcagcttccaaagagttgcgcttcggcccggatgatccaaactatttcatttacagctacgctctcgaaaacctcgccaccgaagttttggggcagttcggcagtgtcgtaccgtaccgcaattcgcacaactttctcgtgatgttgctccccctgcaaaagaacgcctatccggaaaagcttgtgccagagcttgagcgcgtgtgcgaggtcatgcagcgcgagtttgccatgaacaccaccatctgcatcggcaccatcgtggagacagccgtcaatatcaacctctgctatgaggcgacgaacatcgcactggaatattccgccatccgtaatcagggcaaaattttcttcgcctatgagaccggccagaatatcaatctcaactcataccacaacaagctccacatgaagcttgccgagcacatccgcgcaaatgacctcgatgcctgctcgcatgagttcgatctcgcgctttcctacatgtcaaacgtcagctttaatacagccgttgcgtatttcaatcacgtcatgatgtcgctgctcgacgatttctccaccactttcacggatgacgacaccgcttatcccatcttgatggataaactgaataaaattgaccgtcagctaccgaatgtctatatgctgcgcaagcgctgcatggagttcatcaccattttggcgcatcatcaaagcatcaaccgcaaatacggcaacgagcttgccgccgatgtcgcaaaggaatacatcgacaaaaactacgcaaacccggacctttccctgaaaatgcttgccggcatggcaggcctttcctccgcctacttcggcaaaattttcgccacgcagatcggctattcgttcagtgattacctcagcaacacccgcatgaaaaaggccgagcagcttctgcgtgagactaagctgcccatcaaccaaatcagcgaagccatcggcattgtgaacacgaactacttctattctatcttcaagaaaaagtatggcatgacaccgctcgcctaccgccgcacgcgttccggcgaagcggaagatactaaatccgaagaacaggacgaaactacagagtaattcacccggttttacggaccgttcacgaattgttagcagttgattttcataatttttcggaaaacgaattgattttttgtgcatttacgcttataatgtgtatagaacattgaaaggcggcgagcaaatgcgcatccgtaaaaaaccacttggagacaaaaacttagtcggcgcacgtattgagagcattcgccgcaatcgtggcatgaaacagaaagagctgcttgcgcagctgcaggtgcgcggtgttgacatcaacgcctctgccctctctaagttagagggtcagcttcgcaccgtcacggatatcgagcttttagcctttgccgaaattttagacgtcgatgtcttctggctccttaccggcaaatcccaacagatctaaaaccaaaaccgggtagcacaccgcacggcagcttacccggttttcttttagctttttatcgtttacttatttctatcccctgcaccgtaaaatgcgccctatacaaaaactcccggagagcacacagctttccgggaatttcattctgtaatagaaacgcttgcttaaaagcagctcgggtcagattacttcttgctcttctcgcccttatgcacagcccacatggtgtacagcggagccgcaatgcacagcgaggaatagcaaccgacaatcgtgccgaccatcatcggcagtgcaaagctctgtacagagctgatgccataaaccgccgcaacaatgtagatgacaagcagcgccatgaaggtggtcagagatgtcagaatagaacgcgtcattgtctgattgaggctcttattgacgatagccggcagtgcatccgggctcttcgtcggggagagcttgcggttctcacgaatacggtcgtaaatgacgatggtatcgttcagcgagtagccgaggattgtcaggataacagcgatgaaaatatcgttgatcgagaaaccgaaaatcacaaacgcgaaatacacaagcagcacgtcatgcacaagtgcgatgagcgccgtaacaccggcggaaagaccgccgattttcttaaagcgcaacgcaatgtaaacaagcaggatcacgaacgtgatgagcaagcaaacaaggcacttctggaagaacttcgcgcccatggtcgggtcaacggagctcgattccactacgttgaacgtgcggtcggcatacgcgtcggatagggactgcgcgattgcctgctgttcatcgagcgtcacagcttcgttgcccgcaaaggacagcgtcacttggttcgcgtccgtgccgaacgtcttactcaatgcaacggaaacgtcacggccggtctcttcttttacgagggacgcgatttcatccgtatcaacttcgccgtctacggaatacttaatcatcgcaccgccgacgaactgaatgtccatcttcgtgccacgaatgaaattgaaaatcaagccgatgaccatcaggccaatcgagatgccgaacagaatttttctgttcttatagaaatcaaaatcaaactttttcattacttatccgcacctccaaacagccatttcttacggagcggcttgaagccggaaagcgatttgatcatcagacgagagcagaacacgcccatgatgaagttgccgattacgccgacgagcaaagtgtagccgaaggagtagatcgcaccggtcgtggattcgccgaaaatcttagagagaatgttagacggaccgaacacgccgatgagcatgatggcaacgatcaaaatcgtgatgttgccgtcgatgatcgaccaaaggctgttggagcagcccttctgaatggcgccgtccagcgttttgccggtgccgagttcttccttaatacggctcgcggtgataatgttcgcatccacgcccacgccgatggaaaggataatacccgcaagacccggcagagtcattgtaaagctgttcacaaacgggaagtagccggaaatcgccgcaaaggtgattgcaagctgacccacaagcgtcagcacagccgcaaagcccggaatcttaaagatgatgatcataaagaccgcgatgagcgcaaaagcgattacgccggccatgaccatagcatccagagacttcatgccgagcgtcgggttcacggtgctgaagttcgaggtctgcaaagcaaacggcaacgcgccgccctgaatctttgcggcaagctcggaagccgtagctgccgtaaagttaccggtaatagaagccttgccgtctgtgataaccgcgttaacggtcggtgcggaaatcatgatgtcatccatccagatggagatggtcttgcccttcaggcgttcggtcgcttccgcaaatttctgtgcaccttcatcggaaagcgtcagggaaatcgcataatcgtagttgccggaagtggagttctcctgcatgaccggctttgcctcggtcacgtcgctgccttccagaataattgtatcggccgtagtgcccgtcggtgtctggtaaaccgggttgcccgcgccgtccacggtctgggtctcgtatgaattgccctcgcggaatgtcagcagcgccgttgcggaaatttcttcaatcgccttctccgggtcaaagtccgattcgccgctcttccacgggaaacgaacaatgatcttgtcgttggcttcgtcggtgtaaatctcgtagtccgtaatgctcttcgagaccatacgcagctcaatgattgcctttgcggcttcaagctgctctgcggtcgcctccacgccgtcagccgggctgaaggtcgcttccacgccgccgcggatatcaataccccatcttatatcgccggcgcccttgatccatgtgttcttcgtgtcaccgttctgcgtgtaaacgccgaagaccgatgtgtatgtaagcgcaaggatcagagccgcgatgataaaaaacacaggttttttcacgcgcttcatctaattgtttcctccaatggataaaaccgccgtcttatccgtttacttttaaaatgtccgtcatgtaaagcagggtggaaagaaccaccctgcaaatttacacctgacgatttaaattattcctcagaagcgtcctcgccctggtcttcgagcagagcacggatggagagggaaactctcttcttgtcgaaatcgatgtcggtaatcttcaccttaacaacgtcgccaaccttcagaacgtcctgcggcttctcgattcttctgtccgcaatctgagagatgtggatgagaccgtcgatgcccgggagaatcttagcaaatgcgccgaacgtggtcatgccgacaacggtagcgtcgcaaaccgtgccaaccggatactcgttcttgagaatctcccacggattgtcttccttcttcttgtagccaagggagatcttgccgttctcacggtcaaggctcttgacataaacctgaacggtgtcgccgacggagacaacttcgctcgggtgcttgatgcggttccaggagagctcggaaatgtggatcatgccgtccacgccgccaaggtcaacgaatgcaccgaagttcgtgagggacttaacgatacccgtaaactcctgaccttcttcaacagactcccagaacttagcctgtgctgcctttctctgctcgcggagcacggaacggatggaaccgaccgcacggcggcgctgacggttgacttcgatgatgcggaactgaacgtcctgacccttcagagcctcaagatcgtcaccgcggtttgcaacagcctgagaagccgggatgaagacgcggatgccgttatacagaacaatcacgccgcccttaacaacttctgtaaccttgccagtgaggatttcttcagcgtccatagccgctgcaatgtcttcccagcccttgatggcatcgatgcgcttcttggagagcatgatggtgccttcctgatcgttcgtcttcatgatgagcagatccatctcgtcgccgatctttacaagatcttccggcttcgcgttcggatcgttgctaagctcgttagccgggatgtagccggcctgctttctaccgacgtcaacatacacttcggtgggagaaatgcttacaactacaccgtgcaccttttcgtctgtatttaagctcttgagtgattcctcaagcatctcctcaaaattaagctcatttgtttcaattttgtctgtcatggtaacaagtacctcctttattatgcttgccggtgttgaagcaccggcagttatgccgatattcattttgccctttacaggcagggctgcaagctccgccgccgcctcaataagatacgtctgcgcatacggttcacagacctccttgagcttcgccgtattcgagctgtgacgcccgccgatgacgagcatcaagtcgctttcacgcgcaagctcgcgtgcttcgcgctggcgatttgttgtagccttacatattgtatcaaaaactgaagcgtttgtacataccttttttacgaaatccaaacatttttcccattcttctacgttaaaagtggtctgttcacaaaaaagaaggggcatttcggcaagttcaggctcatttttgaatagattttcgagttcatcgcgcgttttgaaggtgcggtacggtgttttgcagcagccgagtatgccctccacctccgggtgttttgcatcgccggccagcatcacgcgcctgccctcgcgctctccgtcggaaacaaggcggtgaatcttctgcacatacgggcacgtcgcgtccttgtaatcgacaccgagcgctttcagtttttcgatgacctcgggcggtacaccgtgcgagcggatgacaaccgtctcccccgctttcgcgtcctcgggcgcatctataatgcgcacgcctttgcggccgagctcctccacaagctgcgggttatggataatcggcccgagcgtgcagacggttttgtcctcgtcaagcaatttgtaaacggtctccaccgcgcggttcacaccaaagcagaatcccgctgttttcgccacgcggatcatacttccttccacctgttctccataatatcgagaccttcctcgcgcagcttctgcacctcggcaaaaatattgcgcgaaacacggcggtaaatcataccggaatcttcggtcaagcccatgtcctcaaaccggattggcttgccgatgttgatgaccattttcttaaacaccttcgggggcttgccgccctcgcccacaatcgccacaggcaaaatcgtacagtgcgtcttgtacgccagcattaccatacccattttcgggttcaaaagctcgccggtcttcgagcgcgtaccctccgggaacatgcacacgaccttttcttcctccaaaaggtcaatcgccgtctgaatgccctgtgccccgcccgtgccgcgggagattggaaacgcgccgaggctcttcaaaaatccgccgatgagcttgttttcaaaaagctcggccttcgccatatagtgtaattgtcgtttcggtattgcgcagccaaggtaaatcgggtcgcccatcgtcacgtggttagagcaaacgagcagcttgccggtaagcggcatgttctctctgcctataatacggtacgggtgcagaattttaaagaaaaacagcatcacgtactttgcaaggaaataccaccaggaaaggtgttccttcggcttcttattttcagccatgcttcacgcccgtcctttcttccacgatctccagtaagcggttcaccgtaccgttaaaatccagctcgctgttgtcaagcaaaatgctgtcctccgctgccttagattgcttttcgtcctgcttgtcgcggcgaataacgtccgcaagcgtttcttcatagctcacgtccacgcctttttccttgagctccttgtagcggcgctcggcgcgcacctcgggcgaagccgtcaggaaaatcttcacctgtgcgttcggcaaaatcgtcgtgccgatgtctcggccgtccatgatgacgttgtactttttcgccatatccacctgcgcggagaacagaaacttacgcactgccggtacggaagcacacgcagaggccgccatagagacctctggcgtgcggataaggccggatacatcctccccgtttaaaatgacgtgctgcacgccgtcttcgtatttcagatcgacctgaatatcccgaagcttcggctccaccgcttctgcgtctgcagggtcaacttcactgcgcagcaggtaaagccccaccgtgcggtacagcgcgcccgtatctacataaacaaagccaagcgcctttgcagccgctttcgccacgctgcttttacctgcgccggcaggtccgtcaatcgctattgcatacataatataacttccttatatataatgatagtttacagattttcgcccgccgcgtgtcccgttgcaaaggcgatctgcaggttaaagccgcccgtgtacgcgtccacgtccagaatttcccccgcaaagtacaagcccggaattaatttggactgcatcgtcttcgggtcgacttcctttacggaaacgccgcccgccgtcacaatcgcgccggaaagcggtgcaaagccggaaatctccaccgtaaagtgctttaagacattcaaaagcaccgcacgctgctcgcgcgtgatggtgttgcacttctcttccggcggaatgcccgaccgccgcacgacaaccgggatcatcttttgcggcaataattcatcgagcgaattgctgaaattgcggttcttgtttttctctaaatcgcgtaaaaggcgttggtcaagctgttccggggtgagcgccggctttaagtcgagcgtcactgtgtatctgccgggcgccatatgacgcatgtgcgcgctcgcactcaaaatcgtcgggccggaaagcccaaagtgcgtgaacagcagctcaccgaagtccgtgtagaccggcttctttttcttatcattgtccgtcacggtcacgccgcagttgcgcagagaaagcccctgcatcgccgggcaatcctcgtcatcagaggtcagcgccaccaaagacggacgcataggaataatggtgtgccccagcttttccgccagccgcgcgccgtcgccgttcgagcccgtgccggggtacgaagcgccgccgcacgccaaaagcacgctgggggcctcaaacacatcgttttccgtgcgcacgccgatgacgctgccgttttcggtcagcacctctttcacattgccctgccgaatttccacgcggcactttttcagcttcttccaaagcgcgtccgcaatgtcgtgtgcattgtccgagaccgggaacacgcggttgccgcgctccgttttcagcggcacgccaagcccctcaaaaaagtccatcgtgtcctgcggggtgaaatggttcaccgccccgtacaaaaaccggccgttgccgggcgtggattcaatcaccgtgcgcggttcgcagttgtttgttacgttgcagcggcccttgcccgtaatgcggatcttccgcccaagctgtgcgttcttttctaataataagacgtgcttgccgcgctctgccgccgtgatcgccgccatcatgcccgcagcgccgccgccgactacgactgcatcaaacattacgttcctcgtcggtcttgtcttcgaccttctcgtacacgccgtactcgtcccaaatggtttccaggtttaagagtgtattcgccacttcgtctttctttttaatggccaccgtcacaatgagcgcgttgataagcgccatcgggcccacaagcgaatcgacaaatgagaccatgtcgctctttgcaagcagcacatgctccgcatacttcgtcagcggagaaagcgtgctgtccgtaatggctacaaccgtcgcaccgcggtcggaagcgtatttcagcgccttcactgcttttttggagtaccgcgggaagctgatgccgacaagcgcgtctccctcgccgatgtgcaccatctgttgtaaaatctgcgcttcgctcgtcgcgctgataagctgtacggaatcgaacaccaaggagaaatagtacgagaggaacgtcgcaatggcaagcgagctgcctgcaccgatgatataaaccttctttaccttcacaagtgcatcggccgcacggtaaaactcctcatgtgaaatagactccttcgtgcggcggataatgtcgatgtcctgatccatcgagctgtcaagcaggcggtcaagcggaatgttcgtcgaggtcatttcaaggcgttgcacgctcgtcatgcggttgcggatcatctcctgcatcgcctgctgaagcgccggatagccggagtatccgatctccgtcgcaaagcgcaccacggtcgattcgctcacaccgaccgtcgcgccaagcttcgaggccgtcataaacgccaccttgtcgtagtgctcctcaatatacttcgcgatcaacctctgacctttggaaaacgatctcgcattttgcttaatgcgattcgtaagctggatattcatgggtgatttcctttctttacgtttcctgacagaaaattttacagcacgagtcgccgcttcctgcaaaatttcctccgtgcagacgcggccgcatacctgcccctacggacagggcacacgtatgcacggtatcataatgtttattttagccgatattcctgcaaaaatcaagggatattttcgctgttttctatgaatttcaaaccgtttttgcaggaaacgtatcctttcatgcaaaggtatgtccgtgcggcacggatatctctctccattctttgccatcctttacaaaagaagcttgcaattcctttcgttttgttgtatccttattccgattattaaccgtttaattctgttgatttcccacaacagaataaacgcacccgtcttttggaggtcttttatggaaagtaaaacgctcatttcgtccattcgtgaaaatatcggcaaggtcatggtcggttccgaagaaaccatcgacctcttgctcaccgcgcttattgccgagagtcacgtgctcatcgaagatgtgcccggcatgggcaaaaccgtgctcgcaaagtcacttgcaaagtccgtcagtctggagtttagccgcatccagttcacgcccgacctgcttcccagcgacgtcacgggcctcaactacttcgaccagaaagcaaacgatttcgttttcagccccggcccggcattctgcaacctgctcctcgccgatgagatcaaccgcgccacaccgcgcacgcagtcgagcctgctcgagtgcatgggcgagtgccagatcaccgtggacggcgtcacccgtccgctttcggcgccgtttttcgtcatcgccacgcagaaccccatcgaaacgctcggcacctatcccctgccggaagcccagctcgaccgctttttaatgcgcatttccatggcctctcccacaaaagagcaggagcgcgccatcttgcagcgctttatgaaggaagagccgctcgaaacgctgcaaagcgtctgcacgcgtgaggatattctcgcgctgcaaaagcaggcaaaggagatttacattcaccccgtcctgctcgattacatgatcgacctcgtgcaggccacgcgcagttggccgaatatcgatatgggcgtcagcccacgcggcagccttgcgctcgtccgtgccgtgcgcgcttacgccttggtgcgcggcggcgcatacgtcgtgccggaagacatcaagaccgtcgccgtgccggtgctcgctcaccgtttgcagctcagcggctccgtcggctccaccgatgcccagaaaaaggccatgaccgatgtgctctcctccgtcgccctgccgactgaggactggtcaaagtaatgtgggcgctccttctgctcccgatcgttttgctcgtcctttactttgcacagcgccttttgttccgccgcctgtgggacaaaaacctcaccgtacagatatcctttgaccgcgattacattttctgcggcgaagaagcgaatctcgtcgaaacgatcgtgaacaacaaatacctgccgctccccgttttggaggtcggcttcgatatgagccgctgggtggtgtttcaggacgaagaaaactccaccgtcagcgatatgacctaccgccgcgacgtgttcacagcgtccgtgcgccagcgcatcacgcgtacactacctgtccgcggcaaaaagcgcggctattaccgcatcgcgtccaccacggtcacgtcctacgattttctgatgaccgaaaagcaggtggcgcattttccgcaggaaacggagttctacgtcctgcccgcgcacatttccgcaagccacatccgcattccgtacagcaagatcatgggtctgctcgtcagccgtcggcgtgtgtacgacgacccgttcgagtttgccggcatccgcgattaccgccgcagcgaccccatgaaatacatcaactggaaggcctccgcgcgcggcggcacgttgctcgtcaatcagcacgattccacgctgtcccaaaaggtcactatcctgctcgactgcaccggcatcggcagcgccgtgacggatgcgttaaacgagaccgccatctccatcgccgccgaactcgcggagcgcatgctcgcagacggcatctcggtctccgtcatctcaaacggcatagacaccgtagacggcaaaatgctctccacgggcgagctcaccggccgcaacaccgcactttacctgcgccgccggctcgcaagattggaatgccgcaacgacctcacccccatgccgcagcttctccgcaccctgcacgacggcgcacacggcagcgacctctacgtgctcatctccaaggagcaaaagctgcccgttctgccggatttggaagccttaacggagggcagtgacgccatctggatcctgccggaagaccgcaacatgccggagcgctacaaactcacggagacctcaaaatccgtcgaaatcgtccgctgggaagtttaacgggaggggacaaaatgaaaattttcaaaaagcaaattcccgtccgccacattttatacgtcgtgctcggctggctgcacgccactatgctgtgtgtgccgctttacgcgctcgttttaaattttgtctcggagggcatgacaaaagacgtcatcctgcaaaacatcctgcggggatttttgattctcgctcccatcgcactcagctggttcgcaataaaatgcctgcgccgcatctttttctatattctcgcaagcatcggcatcacggtactcaccggcttcctgttcgattccgtcctcatggccgtcgtcgcgctgttcatctgtttcatgcggctttacggccgcctgcacggcgaaagccactctctgtttgaccacgccggctatgcgggtcttgccgtgttcgccgtgccgttcctgtgctctgtcttcaccgaccgcgccgatttgcttttccagcccgtctccctcgttttcgcggccgtttacttcgtgctgtgcctcacgcagcgcggcatccgccgcatcgatgattacattgacgtcaacgccgccatgcagaacatgcccgcacgccgcatcgtgcgcatcacctgtgcgcttttggccgccgcagccgtgttctgtaccgccgttttgctgccgccgctgctcacaagcgacatcggctaccgctacaccccgcgcgaggcgatccacgccgaatacaccctgcccgagcagaccgaaacatcctccggcggcgatatgccgcttgacgagatgattcccgccgcagagccgagccctgtgctcgtcctcatcatgaaaatcctcgaatacatcgtgctcatcgcgctcgcgggcggcctcatcttcggcgttatttacagctgcatccgcatctcgcgcgggtttaaaacctcgtttgtcgatcggcgcgaccttgtggaaaacctgcccgaggacgaacgcaccaccgtgcgggaacgcgcccaaaagcgcgaccgtcccggcttccttgaccgctccccgaccgctgcggtgcgccgcaaataccgcaaaacgctgctgcatgccgcaaaagagccgcccgcgcgctggatgtcccccgccgaagcggaagcccacgcgaagctccaaaacgatgccctgcacatcgtctacgaaaaagcccggtacagcgaaaaaggctgtacaaaagacgacctcaccgcaatataagctgtacaaaacgaacagcccatggcacacggaaaactgaacagcaccccatttgttagacagtatgatataatgtttaacaggtggggtgattttaatgccaaagggagtaccaaacaaacgatacacgccggaattcaagaagctggtcgtggaaaccatgatgaaagaaaagatgagttacagagaaacggctcgacaatttgaaatcagcaatcatcacagagtacaagactg

SEQ ID NO: 20 - DNA, 359195 bp, Intestinicoccus colisanans
  source 1..359195: mol_type = genomic DNA
tctggggtactgcactccagaagaactctttgaagcattccttgacattgtttgcgcagcctaagcggctgcggaagccccaattttctaccgctgggtgtccaacttgaacttgcaatttgcggtttaaatcggttttagcgttttattttatgaatttgccttgcaaattcatggggagacccccctaattgtggttcccatcctgatttttgttaggcaaaaggtgtttcgtcgtctgcggacgacgacttagggcgctgctctaatgaacccaagcgaacacacacgttcgctttaagcttcttgaaaaagcttaagcaaaacttttaaccaccgttgctgttggcttatgtttcttttatactatcattttgtttctccaaaatcaagaaaagccttgttttctgcccgaaaacacaaattttggttgaaaagcgaaaagttccgtgctatactgaatgtgaaaaaagggtgctgacgtataaagtcggctgagagcggcgtgaacgccgaaacctgttacctgattcggataatgccgacgtaggaaaatacgcttattttaagtgctttttatgccgcgtgccgaatgggtgcgcggtttttgttttctccgctttatcccctaaatctcggtagaaaaccggaggaatgaactatgaagaacaacaatacaaaaaagcttgcggcctgcgcggttatggtcgcactgggcgctgtgctcagcatgatcaaggtgcttcagatgccgtttggcggttccatcacgctgctttccatgctgccctgcgccatgatttccatcatgtacggccttaagtggggctttgcggcttcctttgtggaatccgtcgttcagcttgcgttcggcatcacgatggacggcatcctcggctggggcatgacgccttctgctctcatcggcacgattttgctcgattacatcgtggcatacacggttatcggcattgcgggcattttccgcaagaagggttatgtaggcatttgctgcggcacggcgctggctgttgcgctgcgctttgtgtgccacttcatttccggcgccattatctttgcaaactttgatgagtttgtggcgttcggcgcttcctgggtgggccacccgtggctttactccttctgctacaacggcacttacatgctgccggagctcatctttacagttatcgcggcggttattctgttccgtctgccgcagatgaaaaagctcatcgcggacgagggcgaataaatctaaacaagcggaaatttcgggcggtgctctgcggagtgccgcttttttcgcataaaatcccgccgcggtagttgtgtatctttgaaaaacgtggtatgattgataaatcacaagcgcagcatccagctgcacgaagccgtgcagcagccagcggcgcgaaaggagtttaacaaatgaagaaagttctgaagcccgaagaaaagaccatggaaaaaatcgtggcgctctgcaaaaacagaggctacgtataccccggctccgaaatttacggcggtctgtccaactcttgggactacggcccgctgggctgccttttcaaggacaacgtaaaaaacgcgtggaaacgcaagttcgtgcaggagagccgctacaacgtggcgctggattccgcaatcctcatgaacccggaagtctgggtggcaaccggccacgtgggcggcttctccgacccgctgatggactgcaaggactgcaagacccgtcaccgtgccgataagctcattgaagacttcaccggcgaatccgcagacggctggacgaacgagcagatgcagcagtttattgccgacaacaacattgcctgcccggagtgcggcggccacaactttacggatatccgccagttcaacctgatgttcaagacgttccagggtgttacggaagacgcaaagagccaactgtacctccgcccggagactgcacagggcatttttgtcaacttcccgagcattcagcgcaccacgcgcaagaaggtgccgttcggcgtttgtcaggtgggcaagagcttcagaaatgagattaccccgggcaacttcattttccgcattcgcgagtttgagcagatggagtgcgaattcttctgcaagccgggcacggacctcgactggttctactactggaaggatttctgcaaaaactggcttttgaacctcggtctggacgaagcgaacatccgcctgcgcgaccacagccagaaagagctctccttctactccaaggcgacgacagatattgagtatctgttcccgttcggctggggcgagctttggggcattgcagaccgcacggactatgacctcacccgccatcaggagcattccggcaaggatctctcctatttcgatccggagacgaacacccgctatgtgccgtatgtcgtcgagccgtctctcggcgcggaccgcgtagcgctggcgttcctgtgcgacgcttacgacgaagaaaacctcggcaccgaagaaaagccggacgtgcgcgttgtactgcgtctgcacccggcactggcaccgtttaaggcagcgattctgccgctctccaagaagctgagcgaaaaggccggcgaggtttacgatgcgctcgcaaagaagttttctgttgactttgacgatacgggttccatcggcaagcgctatcgccgccaggatgagatcggcacgccgttctgcatcacgtatgactttgacagtgaaaatgacggctgcgttaccgttcgcgaccgtgacagcatggagcaggagcgcgtgaagatcgacgagcttgaagcgtacattgcagagaagatcgatttctaaagaaatataaatagacacagcaccgccgtttcgactgcatgaaccgtgcagagaagcggcgggtttgtttattttgccgttgaaacaccatgcaaaatatgctaaactaaataaaaatgaattcgaaatcgtgacacataaaagttatcacgaaagaggaaatggattatgagaaatactttttctaaacgtatatttgctgttttagcggcggctttactcggcgctgcgctgtgtgcgccgcttacctttgcggatgaagccgaaacggccgataccacagacagcaccgaaacggtggacaccacggaaggcacgaccgacaccgcaggcgaagacagcagcggagcggaatcgttctttaatgagctgaaggccgataacggcgtcggccgcacgctgttcattgcgggtgcggtgtgcatcgtgctcggcgtcggcggagttgtcagcatcattttgtggcagcgtgcaagccgtaaccgcgacagcggcgaagcggaccgcgccgaggtgctggatgagattgagcaggaggaacgacgcaaccgcagaagacgcgaagaagagcgcatgcgccgcgagcagatgcaggcgcgccgtgagacagagccccgcgtgcccacgtcctttgacccggataaagataccggcgagctgccggtgatgccggtgtcggcggagtacaccgcagaacgccccatcatgccggaaacgccggtctccatgcagccacagaacgtgcgccgcgctgcggtgcagacctcagtgaatcgcgcgccacggcaaagcgccgcaccgagagctgcaaagcccgccgcacctgcgccgaagcccgtgcagcagcgcccggcaaataccccgaagccggctgcacagacagtacaggcaaagcctgccgcgccgaaagcgcccgaaaaatatgaccttgaggacattttaagagaagtccgcgagatgaacgcgaataaataatcgtacataaaaaggcctttgcatctccgttttggacggtgcaaaggccttttgtcgtcttaattttgcgtcaggttcttttctttctcgaaaaatgctttgcgcaatgtctcgaaatcctcgggtgtgcaggcttttttacaggtggggatgaacgagcctgtcaccgtgaagcacgctttcatgacgtcgcacgggtagttttcacactggccgcaatgtgcgatgtgcttttcgttcacgcattttacaaggcgatagcggcaccagttttcttccttgcagccggtacaggcaatctcctcgtttgtcaccacgtggtcgcggtagccgattttataccacagctcggcggtgcggtgcagttcttctgcggttttggtgtacggcggcacgttgtagcgcggacataccgcgcagtcgtttccacacgccgcaatgattttttcacacatagagaactcccccaaaaaactatgtctattgcagctcgtcgcggtagtaggcgagaagcagatcgaccattctgccgtaggagcgcaggccgttttcctgcccgttggcttttaaatacgcgtcgttcacgcggtcggagacctcggaaacgggcgtttcgtaccgcttccagtacgcattatttgaccgaatgtcgcggcgcagtgcgtcgctttttaaagcgtccgcccggttccacaggtcactgtccacagtgagcaaagcattcatcgcgtggacggacgccaaatacacaccgctgtaacggaattccgggtcgtcactttgcaggcacgccaaaaatgcgatgaaattcgcttcgtcctcgcgcatgtagccggaaaggtgtgaaagctcgtggcacatcgtcacggggatcaatacgtcgttcatgtggacgttgacgttcgcttcaaacgtgaacgggcagtaaataccgctgatgtcaaggtacgacatcacttccgagaacagcacgggcttcggtttgccgtttgtgtagagcgtggaatacgtatcatgaaggctgttgaatgatgattttgcttcgtctgcatcgagaaaaacatcgtttgaaagctgaaatacaccgttttcgtcttcgggcaggttttcgcgcaatgtgttcgcttcgttgattaaatacacgcacacatcgtaaagctcctcggcggaggactcctgcacggtaagtccgctgacggcggcaaagctgtaccggcggtggttcgtgccgtagttcgttacgcacaaaaacgcgatgcacgtggcgatgagaacaggaaccgacaaaaaccgcacaaagtacgcaaaacggccctctttatgacgaatgagtttataaacgccgtgaatgagatacgccaaaatgaaaaggacaagcgcgatcagacaaaattcgccgacagaaaacgggaagacgcccgtaatggcggaaaagaactgcgcgtacacggggtagatcgtcacggcataccactcggcaaaatctgcgctctgccgtgcggcgaagtccaaaaggaacgccgcaggcagcaaaagcagcagccaaaagcgctttaaacgaaacgctttaagataagttttcatagtttgaattcctcggcgctgtattgcccgagcttttgttcgcttttcggctcgcggcgcagcgggtcatattgaaattttgcgcagtgctctccgccgagctgccccgcaagacattttttctgtacaccgtctgcatgaaacgcgcagtaggcgcagtccggctcaatgcggctgccgaacagagcgggtgtttgttttttctttttgcgtccgaacactttcgtcgcctccgattttcaggttgctcttagagttgttctcattgtagcattttcccggtggaatttccaccacaaattttcgacggtgtttttccgctgcggagaatacacgtgagaagaaagaacacagacagcgcgatgagcgccaaggatgatgccgcgctgcccgccatgggcgcggtgttgaggggcgaggtttccacggcaaccgaggtgtttgccgggagaaaataggaaagcagcaaataaaatgcagcggaaagcagaccgtttaaaaagcgtgcgagaacatatctcgttttcgacagcggcagccccgctttgtggaaaaaagagaagatctgcaagtggatacaaacgccggaaaatccaagcccgaacgctaaaaaataaaccggcaggtgccaatatacgcactgcgagactccggcggtgatctccagacccatcgtcagcaatgcgccggaaagcggcacggtgtacccaaagcgggagagaaacccgcataaaaactgaaaaatgccggcatcgtgcaaaacggccaaaagcatggaaaacacaaggatgaacccgcaaagggaaacggtggccttaatgccgtcctgcacagcggagacgatgccgccgggagcagattctgtcgattttaggcttttttcgggtttttcggcaaagcgcgacagggtgagtcccagaagtaacggcgcaagtgcgcaggcaaaaaataaattcagcccgatgcggtcgcttcttaataataaactgcccgtataggctgccgcaaacgcatagcccggcgcggtacagaagcataacagccgcgctgcctgttcccttgtgagctttccggctgcatataaatttgcggtgatcttcgcgccggtagggtagcctgcggtgagccccaacaaaacggcgggagcggcgcaggcgggtaggcggaacacatgacgcattacgggggaaagcgggcgaaacagcacctgcgccgcgcggctgttcgtgcataggcacgcgagtaaaataaacgggaacagcgagggaatcagcgtgccgaggcatgtgtggatgccgctgacaacgcctgcggcggcagcggtgcggtgcctgagcaggagcaaggcgagcagtaaaagcgcggcggcgcggacataaagcgccggaagctgcaatttttggcgaatgaaaaaagcgatgtgttctgtatgcttcgacacggtgaaccctccttttgaaaaagtatatgcgtgtttttccgcacatacgtatagaggagtaaaaagaaagagggtgggtgcatgggtgagcttgcagataagctgcgctatgccatgcaggacggcacgatccgcacggaaattctcggcacggcgaagcttattttagagggttgtgacggcgtaatcgaatacgaaacggaaaagatcggcctgcgctgcgggcggcgcgccgtgtgggtggaggggaaaagcttacggcttttgtgtcttgaagaggacggcgcggtgatcacgggacatattgaggcggtgaggttcgcatgaagaaaatcacgcattgggtgctcggcacggcaacggcgcgtgtttcgggcgatacggcacggtttatgaacattgcggtgaaaacgggtctgcgccccattcgacttcaaaaggatgggaaagacgtgcttttcaccttgtatgcgaaggactacaaaaagctgcataagatcaaacagcgcacgcacacgcgggtgaagcttgcggagaaaagcggcttcccgtttctgttccgccgcatgctgcgccggccgggacttttgcttggcacggcgctcggcgtggcgctgatgctgttcctttccggcttttactgggagatgacgatctccggtgaagatattccgtatgccgaaagagaaattttggcggcagcaaagcgcgttggcgtgtatatcggcgcgccgcgaagcaccgataccgctttggcctctgtcgcgcttttggaggagctgccggagctttcgtgggcatcgttcaacacggagggttgcaccgtacagcttgagctgcgcacgtccgtcacaaaggcggagggcgcggagcacgacggcacgggggacatcatcgcgtcacgcgcggggctcatccattctatcacggcgcaaaacggcacggtgctcgtgaaagtcggttctgcctgcgccgcggggcaggtgctcgtttccggcatcacacaggtgggcgacccgtatgacccggaatacaaccccgtgcgctgtttttacacccgcgcccgtgcggagattctggcggagacacagcgcacattcacggcatcctgtccgcttagtaccgaaacagtgcgcgaaacggacctcggtacacagcgcgcgctgtatattttgggcgtgcgcgtgccgctctcgctttccggtgcgccgaaaggccagacggcatacacccgcacgccgttcgttttgcaggggcacacgttgccgctgtgggtggaaacggtgcgcgtatatgaggaggagaccgtgcccgttacgttcacggaggaagaagcgcagcgccgcgcacttgaaaatctgcatcagctgcaaaagcttgcgcttggagaagacgggcgtgtgcttacggaaaacatcacatatcagacaaaagacggcgcggtttacgtcacgtcccggtgcgtatgtcttgaaaatattgcgcaggaggcgccgctcaccctgcctgaagagcctgaaaatccggagaatataggggtatttgtcggaaatgtacagggaaacggctaaatttcgttgaaaatttcataaccacattgggaacacttatgctataataaaacaggaaattcggttttttagactgcacggtttttcaaagctgtgcggcaaaaggagaacgatttggaaagaagcattcatgtagacaaagcagaatacgcggcagagcttttcggcagctttgacgtgaacgcaaagcgactggaaaaggcattcggtgtaacgttttcctgccgcgattcgcagatccacgtcatcggcgaagaacccggtgtttcgcgtgcggtgcgtgcggcagaaagccttttgcggctcgtcgaaaagggcgaagtcctaaacgaccagaacgtcggctactgcatcgacatggtcatggaggacagcgaagcacagatggcgccgcttacggacggctgcatctgcatcacggcgaaaggcaagcccgtaaagcccaaaacggtgggacagaagaattattgcgacaatattcgcaataacaccatcaccatcggcgtcggccctgcgggcaccggtaaaacgtaccttgcggtcgccatggctgtgacggcgttccgtgcgcagcaggtgaaccgcatcatcttgacgcgccccgccgtggaagccggcgagaagctgggttttctgcccggtgatttgcagcagaaggtagatccctacctgcgcccgctttacgatgcgctgttcgacatgctcggcgcggaatcgtacgcccgccttgtggagcgcggcagcattgaggtggcgccgcttgcgtacatgcgcggcagaacgctcgacgacagctttatcattctggatgaggcgcagaacaccacctgcgagcagatgaaaatgttcctgacgcgtctcggcttcaactccaaaatggtcatcacaggcgacatcacgcagattgatctgccggacggcagacgctcgggcctgaaggacgcgatgcgtgtgctgcgcaatgtggatgacatttccgttttccgctttaccgaaaaagacgttgtgcgccatcgcttggtgcaggatatcattcgggcgtatgaaaaagcgtccgcagcaaaataacccctatcgaaaggattttagcatatggaaaaaatcagagtcatcatcacaaacaaccagaaagcggtcaaagtgccgaccggcgtgcgcatgctcatccgtcgctgttgccacgcggttctgcggatggagaagtttgaggattccgctgaaatcagcgtgacattcgtggacaacgagcagatccgcgagctaaatgcgcagtaccgcaacaaagatgccgcaacagacgtgctctctttccccatgggtgagaacggcgtgtatgacatcaaccacgataccggcgcgaagattctcggcgacattgtgctctctgtggaaatggcaatggcacaggcaaagcgctacggccacagcttagagcgcgagatcggctacctgacggcgcattctatgctgcacctgctcggctatgaccacgaaaacggcggcatggagcgtgtgcgcatgcgtgaaaaagaagaatacgttatgtcgcagctcggcctgccgggcacttccagctacaccgtttaacatggtgccggattggaaaacaaacggtaagacccgcacgcaggcggacagctttcgcgatgccgcgcgcggatttttccataccgtgaaaacggagcgaaacatgcgtatacaccttacagcggcggtatacgttttgtttttttcgccctttctgggcgtaacgcgcagcgaatacggcgttctgcttttgaccatcgcaatggttatcgcggcggaagcgttcaacaccgccattgagatgctgtgtgattacgcgcagaaaagctataatccgctcatcggcgaaacaaaagatatcgcggcgggagcggtgcttgtgtgcgccgtttttgccgcttttgtcggtatagccgttttgtggcgtccagaagcgatcttagcgcttttgataacaatcgttacaaatccgctttaccttgtgcttttcattctgtcgctcattttggcctttttcttcattttcaaagtgccatgcggcgtgcgggaaaagcttcataaaaagtgatataaattatcagaaaggaaaccgcggctgcgtgccccgggaaaactatggatacagaaaactacatgaacgaaaaatcggcgtttatcgccattgtgggcagaccgaacgtgggcaaatcctccattttgaaccgcctgctcggtacgaagcttgccatcgtttccaataagccgcagaccacccgcacgcgcattatgggcgtgtggacagagggcgaaacgcagctggtgttcatcgatacgccgggcctcatcaagccgaagaactccctcggcgattacatggtgaaaagcgttacctcgtccgtcgcagatgtggacgcctgcctgctcgttgtggaggcaaacacgaaaatctccaaagcagatgaagaacttgtgcaccgctttaaagatttaggtgtgccggcgctgctcgccatcaataagattgaccttttgcaggacaaaagcgttttgatggagcagattgcgaagctctccgcgctctacgactttgaagctgtggtgccggtctccgcgcaggacggcaacggcatggacgcgctgcgtgaggagctcatcgcactggcggagccgggcggacacttcttctcggaagatacgctcacagaccagccggagcgcgtcattgcgtccgaaatcgtgcgcgagaaaattctgcgctttacggataaagaaatcccgcacggcgtcgcagtcgtgacggaaagcatgcgcgacctcggcaacctgacggagatcgatgcgacaatctattgcgaacgcgccacgcacaagggtatcatcatcggcaagggcggcgcaatgctgaaaaaaatcggctcgaaggcaagagaagacatggagcgctttttcggctgcaagatcaacctgcgcctttgggtaaaggtgaaggaggactggcgccagcgcccgcagatcctcacaaagctcggctttaacgagcacgattttgaccagtaccaataaaccgtgattttcgggaaaacggtcacattttgagaaattgacagacgtttccacggataaaacccgcaaaaaccgcagaagctaaaaacagccatacggtttaggaggcgtttgtatgcgaaattccccgatgcagaatgcggcgtatgccgcgtggaacagcttttataaaagcggcaaggcggaggattacatccgctacgtgcagcttacacgtcgggagcttgccgacgtggattttacggcaggagactttgatgcaggtaaagacccagggactcatcattcgggagcagacggtgggcgagagcgaccgccttgtcacggtgctgacgcgtgacgcgggcgtggtgcgtgcgtttgcccgccgcgccaaaaatttaaaggacagcaaaagcgccgcaacgcagcttttgtgctattcccgcctttctatttttaaggggcgggaaaaatacatgattgacgatgccgagccgatcgaggtctttttcgggcttcggcgggacatcgccgcgctttcgctggcgcagtatttctgtgagctggcgtacttaatggtgccggaggatacggattccgaggaatacctgcggctcatcttaaattccctgcattttttatcaaagggcacgcggccgatacggctgttgcagtccgtgacagagctgcgtatgctctcgtcggcgggctatatgccaaatttagtcgcgtgcgaaaactgcgccgcgtatgaggcggaaacgatgttctttctgccgcaaaggggcattattctgtgcgacaagtgctttcacggcgcgaatgaaccgtatgtcgcgctgccgccgggcgtgctgactgccatgcgacacattgcgtatgtggattttgagaagctctataacttctcgctgccggaggatgcgctgaaaattctgaacgccgcaacggaaagctacgttgtccatacattacataccgtaccgaagaccttggagttttataaaacgtttttggattaacagaggagattgacccggcaaaaccgggtacgaaaagaaagcaggaacaaaatgctgaaagatcataaagcgctggagctggataaaattctgcttcagcttgcaaatgaaaccacttgcccggatgcggcggagctggcgcagaaaattgagccggataccgacatccgccacgtggggcgccttttacaggaaacggacgacgcgtttgttttaatggcaaagtacggcgcaccgtcgttttacggcatgacgaatgtcacgaatgcgctgcgccgcgcagaagcgggcggcgtgctgaatctggcggaattattgtctgttgccgcgacattgcgtgccatccgcagtgtttcggattggcgtaaaaaaagcgaaagcgtcaaaacggcgctcgattaccgctttgagaccttgcagccgaataagtttatcgaagaccgcatctcgatgaccgtcgtcagcgaggaagaagttgccgataccgcaagcgtcgccttggcggctatccgccgcaagatccgcgcggcatcgctgcgcgtgcgcgagcagcttgataaaatgatccgctcgcagacctaccaaaagtatttgcaggaggccattgtcacccaacgcggcggccgctacgttgtgccggttaaggcggagttccgcaatgaagtcaagggcctcattcacgattcctccggcagcggtgccaccgtgtttattgagccgatcggcgttgtggaggcgaacaacgaaatccgcgtgttgcgctcggacgaaaaggacgagatcgaccgcatcttgacggagctttcccgtgagatcggcgagtttgcggacggcatcatccagagctaccgcgcggcggtggagctgaatctcattttcgcaaaagggcagctcgcctacaaaatgaaggcgaccgtgccgaagctcaatcaggaggggcgcatcgccatcaaatcggcgcgccacccgctcatcgataaaaataaggtcgtgccgaccgatctgtacctcggcagtgattttgatgcgctcatcgtcaccggcccgaacaccggcggcaagaccgtctcgctgaaaacggcgggccttttgacgctgatgaccatgtgcggcctgatgatccccgcggcggatggcagcgaagtttcgattttcgaccacgttttggcggacatcggcgatgaacagagcattgagcagtctctctccacgttctcggcgcacatgacgaatatcatccgcattctcaacattgcggacgacaagagtcttatcctaatcgatgagctcggtgcgggcaccgacccggtcgagggcgccgcgcttgctatttccatcatcgaagccatgcgcaccaaaggcacgcgcgtgatggcgacaacgcattacgcggagctgaaggcatatgccattcagaccgttggcgttgaaaacgcctgctgcgaatttgacgtggcgacgctgcgcccgacgtatcgcctgctcatcggcgtaccgggtcgttccaacgcatttgccatttccgcacgtctcggtatgccggcgaacatcgtagagcacgcaaaggaactcgtttccgatgaaagcactatgtttgaggaggtcgtctcccgcttggaggagagccgccgcaaaatggaagatgagcgtgaaagtgccgagcagctgcgtttgaaagcgcagaacatggaaaaagaggctgaagcgctgcgcgaccgcgccgaaaaggacgcgaagcacgaaattgagcgcgccagaatggaagcggcggagcttgtgcagaaaacgcgccgcgaagcccagagcctgttagacgagctcgaagacctgcgccgcaacaagcagaaattattgaccgcagagcagaaagcgcgcatgaaggcaggcatccgcgatatggaaaaggccagtgacccggtgcacgagcgccgcatagacgaagattatgtgttgccgcgccccttacagatcggcgatacggtgctgatttacgacatcgataagattgcgaccgttttggatgtgccgaaaaacggcgaccagattttggtgcaggcaggcatcatcaaaacgcgcgtgccgctgaaaaacctgcgcctgaccgaccagaagccgaaggaaaagaagaaagccgcaggcggtcaccgcaccgtgacgaagaagatggattccgctccggcgcgcaatgaagtggatgtgcgcggcatgaatttggaagaagcgctcatggaagtggatgcgtttatcgaccacgctttgatgcacaatctcaacatgctgacgattatccacggcaaaggtacaggtatattgagaaacggcattcagcagcatttacgccgccacaaggccgtgaaatcctttcgcctcggcgtatatggtgagggcgaaagcggcgtgacgattgtagagctgaaataaccttaagaggatcgtaagatgcaaagtcttggctttacttgacagcagcgaaaaattctcttaaaataggtacaacagaaccgataccgcataaaactacgaaacaggttttgtgcggtattattttacgcggccgggcacagccgggctgccgaaaggcagggattggatgaaaaatctatataaagcgggtatgggacgctttgcggcgatatgccttgtggttttgatggtgttttccaccggcaacctgtatgcgtttgcggatgaagccggaaacggcgacacaagcacctcgtcttccgaagacggaggcgacacgggcagcaccgtaagcgcgacggcagcggacgccgaagtgccggagcagcccgcggatctttatgtctatgacgaagcgagtgtgatttccgccagtacgaaaacggtaatcaacgataaaaacgctgacctcaatgcgacgtatggtgtgcagattgcggtgttcaccatgaacactttgcccggcgaaaaatccgattatgatggtcgcgtggcctaccttaaaaaggtcatggacacgtggaagcttggcggcgacagcaaaaacgggcttatcataggcctttccgtttcggacggcgactatatggcggtggtcggcgacggcctgcacggcgcgttctccggcacggagctgagcgctttgctgcacgataatctggaagcggattttcagaccggcgcatatgatgccggtgttttaaagctctttaacgccgtggcagcggcagcggaaacgtataaatccggcaaccccacagactcggcggctgtgggcactgcaagtaacgcagagtccaccgccggcggtacggaatcttccgcggccgaaagcagtgcatcctccggagcgagcggctctaagggcggctcggtgattttcagcattttgaaatttgttttggtgcttgtcattgtctttgcggtgttgctgcttatcgtgtacatccacgggcagcgcgtgcgcaaaaagcgccgcgaagcgcgtcgcagacgtgcggaacagcgccgccgtgccgccgagcaggaaacggctgacccgtacaccgctccgcgtaaggaagaaccgaagcgcacgctggaggacgattacctcgacttcatgaaccgttataaataaccgtaaatataaaaatgccgcaggcacgggaaaacccggttgtctgcggcatttttcttttgcggtaagatcagccctttgcgcgtgctgcgatgatggaagccatttcgccgacgttcttcatggaggagatttcgcccatcttgaacttcatgcggaactcgcgctctacagcagagatcagcgtgatgtgctccagactgtcccaatcctcaatgtcgtctgcggtcgttttcggcgtgacgtgaatggtgtcatcgtcaaaaacatcctgaaatacgcggtccagtctttcaaaaatttctcttgtgtccatggtaaaattcctttctgtgatttgatttaatacttaatttagcggggatcacgcttctgcgtggtcgttgccgaacacttcgatcacgtggttctgcggcttgtagtccgcgacgcgcaactgccacacggtgctgccgtcctcgtgctcctcagtcttcgtgaagccgaagcgaccgaaaaggtcgctgaccatcttgttttttgcggtggggtagtagtagccgttaatcgtctctacgcccacttcgcggcagcgctccacaaggcggtccaacatggcaaattccatatcgcgctttaacacgcggcagctcatcagccataggtcaatgtcgagtgccgtgccgtttttcctgccgatgacgacggaaacgacgccgttgtcgccgaatttgtcgatgagcttgccgtacagacggatatagccgtcgtcctcaaatacgctttccatttcggcgggcgtatagcggcgggtggtcacgttgaactggttgctcttgtttgtaagctgtgtgatgcgcgcaaggtacaccgggatgaaatcatcgatgacggcgtgcatctcaaggctctttaaatagtcgttataatcgccgaaggacgccatttccgcggcgcgcagggcgtttttcttgtacatttcgttgcgtttcaagtcatcttcgctgaaggttgtcacttcaaagaagccgctgcggtcaatcgtcgtgatgtagttttccacgccgtccatgtccggcacggccgcgcccttgatctgcgtgcgcacgatctcgcgctcggcggggttatcgtccgcaaaaacgatggaatccggcagaatgttcagctctgcggcggtctcggcaatgttgcggtctttgttttcccagtttgccttaatgatgacgaaatcgtccgggcgcagtgcaccttcggggtggtttaaccccgcaatggcgttttcatggtcatttttagagcagaccgtcaacacgatgccgagacttttaagctgctttacgtaggtctgaaactcgtagtaggattgcgaaacgccggtctcctggccgatctcgatgccgtctacgccgtcgtcgcccacaacgccgccccacagggtgttatcgaggtcaagggcaagcgcctttttattcttgccgaaaatcgacttgataatgtgcgaaacactgaacgcaaaggacgggatcgcctcaaagcacatggcgtatttgtacatgttccagaacagcgggttcgaccattctttcaggccgtaatcggcagaaacaaagttgaggtcgtgaatataaaagctctcattttcgcgtgcgtaggcgtaaaaagcttcgtttaagcgcgtgaggaaattcgtgcggccgtggatgtcccacgcgtcgcggctgccgagcaggcggtaaagcggcatttcaaagttgttttgaatgatggggcagtggaacttttccgcaatgcttttccacatcgccgtgaaacggtttatttccgtgtgcagcttttcgtctatttgctccgtggtgtcggtcatctcgggccagtccgtcacgttgcgattcgtggtgtggatgaacacaatgtccggcttgaagcttaaaagcgtttcatccgggaacatggcgtcctgaaaatactgcgcgtattcggattcgtaaaattccggctcaataccggcgtctaagaggaaaagctccagcgtttttacaatgtcgcttgtggtggagccgccgaacacggcaatcttctttctgatgcgcgaggtgccgtctgcgagcagtgttttctttaaagatttgcgctttttgatgatataagcggcgtcaaagggatattccagttctttcataggctctcctttgttattcttttgcggaagaggtatcctctgtaccggtcgaggtggtgttagcggccgtatccgtgccggaagtcgtcgttggtgcacttgtcgcggtcggcatgaccgttttcggcgtaacagacgggacaatgtgcgaatcggtgatggtctcaccggcgttctgcgcgatgaggttctgaatgttgtcggcgttatcgcccacaacggagtatgcggacatcgtaaagagcacatccgtgatgcccatatctttgatgaagctgacgaggttgcactccaaatagcgcacgtcggcaacgtagatctgctcaaaggaattcgtatagaacggaatctccgcgttaccgaagctgtccttaatgacgagcagcttgcggccgttcttcatctgcgtatcgacttttacgatgcaggagtcgccgccgaggaacttgaggtacgcgtttgcggtgtccacatcggcaaagaggtcgtcttcgtactggtagttaaaagaagtatcgtagtaggaagccacgtagttcgaggctggcacgaagtagtggaaatcgtccgggtcgttcaaaatacgcgtgtcctgcgagaaaccgtacatagtgcctacatagcccggaatggattcgtccgtgtaggtggaaaggtctgcgaacggcacgcctgcggcctcggcaaacgtgcgggcggcatagtaggcgccgcgtgcctgccagtggtggtcggtgcgcaggtaaatatcttcctccgcatgctttttcatcacgtccacaacgtttacggactgaatgccggcattcagcttttcggcaacgccgtcaaagcattccttctggtcgccaacataatcaatgccgtttttcggggtgtagatggcggaagcggtgggggcgggcatagaccaaatggtcacaccgctgccgatcttgctttgcaggtcattgagtgcattggcgtaagcggtgccgccaccgccgccgaaggcctccatacagcgccagtgattatcccagtttacaacaagcaggttgttcacccattccagtgtgctgttatcctcggtgctgaaatcgcggcccattttttcatccgcagcgctcacggccgggaacacacgccccgcggcgtattgcaacaggttcgtgttgtttggcacggtgccgtttgcgggtgtggttgtctgggtgtcaccgtttgcggcagaagtatcggtgttatctgtgctgtccgtctcgggttttgcggtgctgaccgttgaagcgaacatcttcataccaaacaggttcttaatggagttgctcatattcttaaagccgtcgtggttcggcacggtgtcgtcaaaccatgtggcgacgtccgccgtaaacgagccggaaaaatacgatgcaaaagaaaatttcgggaattccgcaaggtttcggttttcaatctgtgagacggtggagcgcgggaaaaggagcagatacagcgtcatcagggcgaaaaggatgaccataacgccgatggataaaacggaaagccgcatgttcaaaagctcgcggcggctcggcttcggcttgcggcggcgctctgcgggttcggcgctttcatccgcagtcggcgcatctacggcttcggttttttccggcttcgcttccggttcggcgggcttgcggggagcaaaataatcaaggtcaaggtctttaaaatcgttcatgtcaatgatctcctccccttagaatctgaaatacaggaacacgttgttcgtggtatcaacgagcagaacactcacgacggcgagcaacaccatacagaccgcaacggagccgacgcggccgatggcataaacggtatcgtttttgctctcgagaaaataactcttgatctttggcaataccggcaggctgacgagaatcgcgaacaaaatgagaaagatgttgttgcgcagggaggagaacgtcatggggtccgtaaacggcgcgctgttcgcaatcatgctgatgcccgtgatattgaggaaaaactgaccaagctggccgagatcttcaaaatagaagatgccgaagccgaggatgatgacaagcttcgtatacacgtgcttccacacaatcggccactttttcatgcgctttttgcccattttctgctcgaacagcatgaagcagccgtagtaaaggccccataaaatgaagttccatgcggcaccgtgccaaagaccggtgcagaaccaaacaaggaacaggccgaaatacttgcgcggcttgccgaagaacggcacgtacaaaaggtagtcgcggaagaaggagccgagggagatgtgccagcgctgccagaactccgcaatggtggtgcaggcaaacggatgacggaagttttcgtcaaagtggaagccaaacatgcgaccgaggccgatagcaatatcggaataaccgctgaagtcaaagtaaacatacagcgaatacacgatgatggtgtaccatgtgccgagcacggaaagtcccgtgatgtccttgccgaagaacgtgttgacaatggaccacaaattgttcgcgatgatgacctttttcgcaaggccgaggatcacgcgcagcgcaccttcgcataggtcggtcgcattgacggagcggttgtcgatctcctgctccacaacgctgtaccgcacgatcgggccggcgatgagctgcgggaagagggacagatacaaaagaaatttgtggtatttcggctgcacgtccaccgtttcccagtagcagtccaaaatgtaggagatagcctggaacgtgtagaagctgataccgatgggcaacgtgatctgcggcacgggaatggccgcgcccgaaacggcgttcaggttttccacaatgaacgcgctgtacttaaagatgagcaaaagcagaatatctacaaaaataccgccgccaacggctaactttgcgcgcggggtatcccgaaatttgccgatcaatatgccgatgaaccagttaaagaatgaactgaacagcaaaagcaaaatccaaagcggctcgccccaagcgtaaaagatgagtgaaaagacaatcagcacgatgtttttggtactgagttttttggcgaggccgtaacagatgaggcacagcggcaaaaagacatagataaagaacaaatcggcaaaaaccatgtatcgggctccttaatcctttgttttttccgtgcaggcacatttcccgatgcccgcagtgtttggtttccataagttttcatacatatattcagtatagacgaaaaagcgaaaagcgtcaaggcaaaagccacccagagccttgtcttttgaggaaaatttgcacggggtttcaaagctttttctgtgtatatttcagtgcgcgaaaatccaatatgattgacaaatgcgccgccgtgcggtacaataacacagtacactttatgaccccaatttaacacgtctcagcaactcggttggatagaggtcacgctcctaaaagaacctaaaagtgttccccgatagatgggtaattgcctcataaattaaatatgcgccagtagctcagttggatagagcatccgcctcctaagcggaaggtcggggattcgaattccttctggcgcgccataaataacgctgaaagcctttattttcaaaggttttcggcttttttattcttttgctgtggttgacggtttgccggcaagcagactcgcaagtgcttttgcgtcaagcgcgggtgcggtgccgaaagccctttgcgtgcgtcgtttcgtgctctaccgtttcgcctgtggggatcccgttcttatctacaatatctaaatattccgccatactatgcctccggttttttcgctctgatttgtctttattttcaacatagcacgctgcatggcttttttcactcgtgtacaaaagaaactgcaagacaaattcggttccgtatgctataataagacacacaaaaaattctcaaaggaggaagcacggctgcgcaatttttttcgtcggcagccgtgcagaaaaggcatgaacaatatcgaatggtttcgcaaagcgaaatacggcatgatggtccacttcggactctattccatgctcgccggtgagtacagagggcgccgcacaccttatgattacggtgaatggattcagtccgcttttgccatcccgaaccgcgaaatggaacagcttgcgggtgcgttcaaccctgtttattttaatgcggaggagtgggtaaagcttgcaaaagaatgcggcatgacctactttgtggttacctctaagcaccacgagggttttgcactgtttgattccgactgcgatgcatataacatcaaaaaagcaacgccatttggcagagacctcatcgcagagttggcggaagcctgctacaagcacggtttaaagctgggactttactattcgcaggagcttgactggcaccacccgcacggcggcggctacgacaaaaccaccggttgcgccggcacggcgtggtataacaactgggatttccccggtgcagacaacaaagactactccatctgctttaacgagaagatcaagccacaggtgaaggagatcatgacaaaatacggcgacatctgcctgatctggttcgataccccgggcgtgatgacaaaggcgcagagtcaggagctttacgaccttgtgaagcagtatcagccggactgccttgtgaactctcgcctcggcaacggcgtgtatgattacgtttctctcggcgataacgagatccccgcagagcgtccggcagagatctcgaaagaacgcgcaggggacatgcagtccatgaacgatctgttcggcttcaagtattcgccgtataacctctatgagaccgcagccacgctgaacgacacatggggcttcaaatactacgaccacaactggaaaacacccgagcagatccttgcaaacaagcagaagctcaacggtatgggtgtaaactaccttttgaatgtcggtcccgatgcgctcggccgtattccgtcctattccgtcgatattcttcgccgcgttcgcgagctggaaacctaactgtcacggtgagtatctgacgtataagtcttctgcgaaaacagcacggagctgctggtcggcgcaggtgagagcggcgtttgtctgccgttcatgtcgcaaagcacaacagcatgtgtgctgacacaggccgcaggatagaaagcgtgcaggaagcaaactgctttgagatttgcattcacaaattctgtttggtagcaatctggcaaaagtgcaacaatttatcccttgcaaattcaaatgcaagagatttgcgttgcactttttctctatctgttgcctgaaaattattcttcgctcaagtccgctttggggtttggctttttatttgcagccttatgaaaccgtgtgagcaacagaacgccgattaaaataaatgccggaaaaaccgcggaaaacagcatgccgctctttaaaccgagttggtccgcagtgagattcggaaaagctgcggcgatgtttgcattgccggaaaccgcgccgcttactgcgcccatcaatgccgggcccacagagcagcccacatcgcccaacaccgccaaaatgccgaacatcgccgtaccgcccttcgggtatgcggcggaggttagcgagaacgtgcccggccacatgaggcttacggaaaagccgcacagcgcgcacgaaagcagagaaagccacgggttttcaaataaagccgtaccaagatagcacaaaatacacagtgcggcgcagaataccatcgcgcctgttaaatggattttctcgccccacacgccgtagattgttctgccgatgcccataaacaccgcaaacaggcacggccctaaaaggtcgccgatgaccttcgtcacaccgagcgcacgctccgcaaacagcgagctccactggctcatggcaagctcgctcgcgcccgcgcaaagcatcaaaagcagtgccacgaggaaaattttcgaggtaaatagcgttttgagcggcgttttttcttcttccggcacggtgggcatcagcggcaccttgaggaaacgaaataaattataaagcggcagcaaagaccacaaaatcgggaggataaaccacaaatcctcgccgatcaagcgcagcaaaagcgtcgtgatgagcaccacgcccacctgtccccagcagtaaaacgaatgtaaaaggctcatcgcggaggccttcgcgtctcccgggcaggaatcgacaatcgggctgatgataacttcaatcaggccgccgcccacgccgttcacaatcgtcgcaaggataagacccacatacggagtaggcagcgcgttcggcagcgtgccctgcatcacaaggcctaaaaacgccagcgcgtgcgcgatgaccgctgattttcggtagccgatgcggtctacgtatttgacggaaagcatatccgtgatgacctgcgtcacaaagttgcacaggatgagcgccgaaatcagcgaatacgaaatgccgaatttgttttggaacagcacgaaaaacaggggagagagattgttcacaatgccctgcgtgatatacccgcggtagcaggcaaacacggtgcttttaaagttttgagtcttctccattcaactataccgcctttaataaaatgctaactttcattatagcggaagacccggcgaaattctaccgtgaatttgacggagaaccgcaaaaattcaatacatctaccgaaaggaattccaaaaaaatgcggcgtaaaagccaaatccatgttgattttaccaaggaaatatagtacaataaaaccaaacagggttttctctttcagaaaaagccccaattcaatctgttattcttttgatttattcaattagaaggagtgttttaacatgaagttaggcgtacttaccaatgttgtaggcaacatgcctcttgaggacgcactgaagtatttcaagtccatgggcatccagatggtcgaaatcggctgcggcggctatccgggcaaagatcactgcgatccggaagttctgctccacgatgaagcaaagtatcaggagttctgcgataccatcaagaagtatgatatggaagtcagcgcattctcctgccacggcaacccgatccacccgaataaggagctggctgcggcttatgataaggacatgcgcaacgcagttctgatggctgaaaaatacggcctgcatcagatcaactgcttctccggctgcccgggcgattgcgagacctctcagtatccgaactgggttgtatgcgcatggccggacgatttcggtaagatcctcgagtatcagtggaagatccttgttgattactggaagaattttgtagcattcgcaaaagagcacggcgtcaacaagatcgctcttgaaatgcaccagggcttctgtgtttacaacacggagacgctcctcaagctccgtgaggctgtgggcccggagatcggcgcaaactttgacccgtcccacctcatttggcagggcatggatccggttgctgttatccgcgagctcggcggcgacgcaatcttccacgtacacgcaaaggatacccgcctcgataagtacaacatggcaaagaacggcgcgctcgacacgaagagctatgcagacgaagcacaccgctcctggatcttccgcagcgtcggctacggcaacgatctgctctattggaaggacatcatcagcgctctgcgccttgtcggctatgactatgccatcagcatcgagcatgaggatagcctcatgagccagaacgagggccttatgaaggctgttgagaccctgaagtccgctatcatcttcgagccgaagatgaccgagacccgttggatctgatttctttctgacaacacgtaaataaaaccacggcgcttcggcggggcaacctgtcggagcgccgcttttatgttttaacgatttgctttttgtccgtatgatacgtgcacagctttaaaaacgggaacagcaaagcggcataaagccctgcacaaaccaccgtttgcagcaaaacaaggggaatacccgaaagcaaaatgcttttcaataaaaactgtgttgcattcgcggcaagcagtgcaaaaaacgccggcatcactgcacttttcaatagcccaatatgtacatcggcgacttttaataatcttcgtacactcagcatcgcgttgaagatggacgagaaaaacaaaattgcaatgtacgcccgcataccggcaaaccgcatgaaaagcaaaatcaaaagcacacgcagaaacgaatccgaaaagttgtatttcatggagttcagctgctcgtcaagcccctttaaaagactgtctaccacgacatccagatacaaaagcggtacgagcggcgccaaaattttgaggtatgccccagcttcccggctcttataaaacgcctcgccccagtcactgccgaaaacgaagaagatccccgagcagaaaatgccgaactgcagggccgcgtgcaccgcgcgctgcgtgatgtgccgcacggccctgcggtgcgaaagctcaaattcccgcgccgttttcgggatgagcaaagacgcgaacgacgtcaaaaacgaagacggaaagtacagcatcggcattgccatgccctgcaataaaccgtaggcggacatggaagccgcacgactgagcccgtaacgcccgagctcgcgcgggatgagcagattttccgccgttgaaagcaagctgcgcgccgcgctcgaaagcgtgcacggcaccgcaatgtggaacatcccgtgcagaacgcccgtcgcctgctctttttctttcggcgtgttgcgctttaagctgcggcggtaaatgagaaatcccgccaaaaacgaaacggcttctccgaatgttgaagcaatcatcgccgcaaagcacgcggcttctatgctctgcggcgcaaaataccagaacagcacaacggcggagaaaatcgtcagcacctgttccaccgcgtcactccatgaggtggaaagcgattcgtccactgctaaaaaatatcccttcatgcacgtgcactgcgacataaacggcagcccaagcgccaaaatgcgcagagacggcgccgcgccggcgttgcccaaaatatgcgcggcggcaaaatccgaaaagcacagcagcaaaaccgcaatggtacagctcaccgtcaggcagaacaaaaagcactgcgtcaccacgctgcgcaccgtgcagcggcggttcgccgcaatggctgccgtaaccatgcgcgtcacggccaagctgatgccggaagtggaaagcgtgatggcgagcaggaacacggagaagatgagctggtaaagccccatgccctccgcaccgattttgcccgataaatacgcacggtagccgatgttcgtaatgcggaaaaacagtgaaaatgccgttaaagcgatgccttgcagcagaaatttgcgttttgtcatgattgtcgcagggcctcctattgcaagttttccgggcgcgttgtataatcagcttatatgagaaatgtatagataattttctgcattttataaaaagagaacaggagttaaaaagtatgacagatcaggtaaacgcagactggaccgaattacaggtcaccattcccgcggcggatacggaccgcgcgggcgacattgcgcagatggtcgtgccctacggcatttatattgaagactattcgcatttagaagaggaagcgatggaaatcgcgcatatcgacctcattgacgaagaccttctcaaaaaagaccgaaccaaaagcatcatccatgtgtatatcagcccggaggaaaacccggcggaagccatttctttcctcaaagagcgttttgaagccgtcggcattgagaacaccatcaccgccgccaactgcgcggaggaggattggatcaacaactggaaaaagtattttaagcccatccccgtcggcaaccgcttgcttgtgcgccccatgtgggaggacgagtacgaagcaggtgaccgcgtcgtgctgcatctggagccgggcctcgcgttcggtaccggcacgcatgaaacgacccgcctttgcatggagctgctcgaaaagtatgtaaagccgggcgataccatgcttgatatgggctgcggcagcggtattttgtccgtcgccggtctgctgctcggcgcaggcagcgccgttggcgtcgatattgatgctctcgccgtcaagaccgccgtcgcaaacgcagagatcaaccacgtcggcgataagttcaccggtatctgcggcaatctggcggataaggttaccggcacattcgatgtcgttgtcgcgaatatcgtcgcagacgtcgtgattttgctcacaaaagatgccccgcgcttcatgaaacccgataccgtctatattatgagcggtatcatcgatacaagggaagacgatgttttggcgtgcctcgcggataaattcgagatcatcgaccgcaaagaggaaaaaggctgggtcgccttggctgcaaagctaaagtaaacatagcgaagcgacaaacaaagtctttggtcaagttttctttagaaaacttgctggttatcagggcagagccctgattcgtcgtccgcagacgacgaaatccttttgcctacattaggactaggaaggtaggctaaacagtccggtggactgtttagccgcaggaaacccagtcaatggggttcctgaacgactcgtagaaacgagtcgttagaaaatataaataagcactaagaagattcggagggattatcatgacagcagaattccacaaggcaaaccgtcagcgcctgtacgccgaaatgaaagacggcagcgcagccgtgttcttttccggcagcgcaccgcgtcagagtgccgatgcgtgctatacattcttcacaaacagcaatttcctgtatttaacgggcattaaattcgcggggctcgtgttggtcgccacaaaaatcggcggcaatgtgcaggaatccatctatatcctcccgccggatctcatgaaagagcgctggacgggccgcagaccgaaagccgatgaagttatggcgcagtccggaatcacggatatccgctttgttgagaactttgaaaacgatatccaccgtgttttgaacagcggcaacgtgcagcgcgtctacctcgacctctaccgccatacgccggacgagggcttagatgaagcccaccgcttcgcgcagaccattaagaccggctacccgttcctcacggttgaaaatatcctgcccgcattaaagcgcctgcgtaccctaaaggctccgtgcgagattgacgccatgcgtcgtgccatgaccgttacgcgcgaaggcattctgcgcatgatgcgcgcttcgcaccccggcatgtatgagtacgagtataaagccgagtttgactacgccctcaccagcgccggcgtgcttgagcccgcgttccactccatcatttccgccggcgaaaacaacttctgcatccattacgacagctacatgggacaagccaaagacggcgatatgatcttgaatgacgttggcgcgcagtgggacggcgagtgcaacgatgtctcccgtggctggccgtgcaacggcaaatactcgaaagagcagcgcatgctgtatgagtgtgccctcaatacgtcgaactacatgttctccatcatcaagcccggtatgctcatggacgatgtggataagaccgcccgccgctattgctgtgagcagctgaaaaagatcggtctgctgtcctcttacgatgagattggcaaatatatgtggcacggcggtgcgcaccacgtcggctacgacgtgcatgatgtcgtcgatgcactcggcaagcctatcgcgccgaacatggtcttctgcgttgatatcggcatttacgccgaagagctcggcatcggcttccgcgtggaggataactgccttgtcacgccgaccggcgcagagaacctctctgcgtccgtgccgcgcaccatcgaagacatcgaggccgtcatggcaaaataacgggagaaattttaatgaagctcattttacccgagcagattacggaagcgcagtataaagcgtatcttgcggattggggtgcagagcgcatcgtgcccattgcgtccgcgaacgccgcaggggctacgccaaaatgcagcttgcgctcgcgttgcctatcgcacacgccgtgagtttgcagaaggtgctcatcacctgcgcagacgattttgaaagaaagaagtgaaaaacatgacaaattttagcaagctcgttttgaaaatgacggagtacgagggcggctgtgtcgagcgtgtcaaccactttttgaaggtgttcgcgttcgcaaagaccatcgcggagggcgaagacgtggacgatgcgacaaaagaaattttggaagccgccgccattacgcacgacatcggcatccgagtgtgctttgaaaaatacggtaactgcaacggccctcaccaggaggtggaaggcccgcccatcgcactcgaaatgctgcccgcgtgcggttatacccatgggcagacggagcgtatctgctatctcatcggccaccaccacacgtacacgaacatcaacggcatcgattatcagattttggttgaagccgatttcctcgtaaacattttcgagagcggcatgacccatgaagccgccgaaaaggtgtacgagaacatcttccgcacaaagaccggcaagcagcttttaaaagacctgttcttgtaaattgcacataaaatcaaaaattagaatattgacatttatgagaaataaccttacaattaacattgcaaggttattttttacttgtcaaatttttaaggagttgtgatatatggcaagaaatttcatgtgcaccaaaacagacccggtcgtcgagaccaaagccggtaagctgcgtggttttcagcttgacggcacatatgcgttccacggcgtaaaatacgccgatgcaaagcgtttccaccagccgaccccggtagagccgtgggagggcatcaaaaacgcgctggcttacggctacgtgtgccccatgctgcagcaggatcagcccagcaacgagctgatggtaccgcaccgctattggccgctcgatgagaactgccagtacctcaatatctggacgcagcatcttgacccgaacgccaaaaagcccgtgctcgtttggctgcacggcggcggattcgcggcgggctcctccattgagcacatcgcctacgagggcgaaaacatgagcaaatacggcgatgtcgtcgtcatttctctcaaccaccgtctcaatatcctcggctatctcgacctttccccgttcggcgaggaatataagaattccggcaacgccggcaacgccgatatggtcgcagctttgcagtggattcacgaaaatatcgcaaacttcggcggcgacccggaaaacgtcacgctgttcggccagtccggcggcggtatgaaggtctggacgctgatgcagacccctgcggcggacggcctgttccataaaggtgtcgtgcaaagcggatgcatcgatcacttcgtctccggcaattccacggagcagaacggcaaagccatcgtcacggcgcttctggcagaattgaagctcgatgatgtcaaagcactggagaccatcccgtacgcacagctcgcggcggcgtacaacaaggtcgcgccggaggtcgcaaagacgggcgcatacgtcggcggcaacccgctcgcaaacgattggtacctcggcgatccgctcgaggtcggtttcacggagcacgcaaagaccatcccggtcatggttggcaccgtgctcggcgagttctcgtttatgccggcattaagcgaagaggaaaaggccgatgctgcgcttatcgattctatgatcgaaaaacgctacggcgcagagggcaaaaagctcaaggagatgttcgccgaggtttacccggataaggacgtcagcgacgtgctgttcatggattctattttccgtgcgccgtctaccgatttcatcttgaaaaaagcacagcacccggaaagcggcacgtattcgtatatgatgacctacaccttcccgtatgacggtgggcatatcgcatggcattgcagcgagatcccgtttgtgttccacaacacgagcctcgtcgccgcgtataacgagcccggcgtgaccgacttgctcgaaaagcagatgtgcgacgcgtggctcaacttcgcgcgtgacggcaaaccgtccagcgaagatttgccggagtggccggcttgcactgcagacgacgaagcgaccatgattttcgacaaaaagtgtgaagtcagacataactacgaccacgagcttgttgcgctgcataaaaaattggccccctcgccgtggagccataacgatgacgaggaagagcagcagatccagcactaagcgcttcgcatttgcctgtgaaagcgaacaaataaaggctttgatttaaactttcttcgagaaaacttgaggggacttggggcgctgccccaagtcccctctgcctttgaaaaggcgggcggaatttttagtgtcgctacgctatgttccccgcaagcttctttttttgcgcagcaaaaaagccgaacacaacttctgtgctcggctcattttgcattaaattgaattacaggttagccttcagccatgcaatgtcttcagcaaggcaagctacgcgatcctgcgggtcgttgtagctggcttcacgctcaacaacgtaaatgacgttgtcgcactgtgcgtcggcagctgccttaacagccttccagtccacaatgccctggccctgcggcacgttcagcttgtcgtgctcttccttcatcttgaggaactccggcgggaagatcggcttgccgtcagcgtctttctcaaacttgaagcgcggggtggtgtcgtggcgggactgcggcttgtttgcgccgataacgccgccgttttccttaatgtggatgcttgcaatgcggcctgcgtggctgttgatgaagtctaccgggtttacgcctgctgcgctgcaccagccgcagtcaagctggaaagccgtaacttccgggtcacatgcatcgatgagccagtcataaagatacttgccctcgtccacatagaactcgtcggtgtggttgtggtagccgatcttgatgccgtactgcttcgcaatgttgccgaggcggttgagttctgctgcaacttcttcagcttctgccttgttgcagaaatttgttgccgggcagatgacgagctttgcacccaactctgcaaagtaggggagaacgccttcaatctgatccagaccaacgtgagcggaatcgaccttcaaattgttctctgcgagaaccttcttcatttcttcaaccggcacttccgtgaagtccgcagtgaactctgcacctgcaaaaccaagctttgcaatggtcttcagcttctcaatcgggctaatcggctcggaaaccagggaataaacctgaacattgatattttccataggaaaaaccacctttctgaaaattataacgtttgcggaaactccgcctcaaaaaatgtgcggcgacacgaaatgccgccgcacacaaaatgtactgattaaaattagtcgaagtaaacaggcttgccggttctgttggactcatagatcgcatcgaggattctcgtgacgacataagcctgatcagccgtaacaaacagctcgccttcacccttcagagccttgacccagatctcagcttccttggacttcggtgccggaccctgagagaagcccgggatgaaacctctgaccttgttgccaacccaagaaatggtcgggtactcagcaacaacatggttcagacggacacggccttccttcgtatcgaggccgccctcggtaccagccagcatcgtgtaagcttcgccgtttgcagcgtagtcttcagccatgttgatagcccaagcagcgcgcagaacaatcgtagcgccgttcttcatcttgatgaagccaacagcggagtcttcaacgtcgtaggtctcgttgttccaggtatcgaactcaccgcggtagttgacctgaccctgatgcttagcatcgagcgtgtggccgagcttctcgaaggaagtgccgcaaacatagtcaacatcgtagttgttcatgaggaacagcgtgaggtcaagagcatgcgtaccgatgtcgatcagcggaccgccgccctgctttgccttatccgtgaatacgccccaggtcggaacgccacggcggcggaggtatgtagcctctgcatagtaaacatcgccaagagcgccggaatcgacaaccttcttagcaacctggttctccgggaagtggcgatactgatagccgatcgtcagcatcttgccggttctgtctcttgcttcgagcatcttcttagcgtcagccggggtagcagccatcggcttctcgcacagaacgtgcttgccagcctcaagagcagcaacggtgatttcgcagtgtgcaacgttcggggtcagaacgtgaacagcgtcgatcgtcgggtctgccagaagctcatgataatcggtgtaaaccttagcgtccggggtgccgtactctttagcggccttttctgctctctcaagaatgaggtcgcagaatgcgcacatatctacgccttcctgctgggccatgcccgggaagtgcttgccgtttgcgataccgccgcagccgataaaaccaactcttacatttgccattggaattctcctcctaaatttacgccgaagtccatacggactcctaacgatttatttctgcttgtattttagaccattccaaagcaaatgtaaagtcctttttgtgaaaaaagcggatttgcacaagctttttctattttgcttgtatcatttgcataaaaacttttgctttgttgcctgcgcatccaaaaatcagccgtgcatttcataaaaaagagcaaaaaaagaggcacaccgcaaaaaatacggtgtaccctaaagtattcttacaacattctgcttataaaaacacagttaaaaccgtgtaaaacacgtatgccgatttgatatagcgctacgcaaagcagaaaaatcagtactgtctgccccagtagaccatgtgctttgccggcttgccgcagcaaacgcaaacatcagagaggtgctcttccttaaacggaatgcaacgggacttcacgccaccggttgcgtccttcagcttgtcctcgcacgcgctgtcgccgcaccacatggccttgatgaagccgggcttgttttccgcaatgtcgagaaactcctcatacgtcgtcgccgtgaaggtcttttcttcaaggttcttcagcgcacgctcgtaaagaccgtcatgcacagcctgcagtgccttttcaatctcgccctcaaggttatcgagcgaaacgaaaatcttctctctcgtgtcgcggcggacgagcacgcactggttctgctcaatatccttcggaccgatctccaaacgcagcggcacgccctgcatctcatactggctgaacttccagccgggggagttgtcggtgtcgtccagcttcacgcggaacttcgtcttcagggattcatacagcgcgtttgccttgtcgagcacgccgggcttatgctgtgcaatcgggatgattgccagctggatcggcgcgaccttcggcggcagtacaagaccgttgtcgtcgccgtgtaccatgatgatagcgccgatcatgcgggtggaaacgccccaggaggtctggtacgggtgctgcagggtattgtcgcgtcccgtgaacgtaatgccaaagttctttgcccagccgtcgccgaagtagtggctcgtgccgccctgcaaagcaacgccgttgtgcatcatcggctcaatggtgtaggtcgccacagcgcccgcaaacttttctttctcggtcttctggccggtcacagccggaatggcgagcacgttcttgtagaactcctcgtaggtgtgcagcatgcgcatggtctcttccatggcctcttctgcggtttcgtgcatggtgtggccttcctgccacaggaactcggaggagcgcaggaacggacgcgtcgttttctcccagcgcacaacggagcaccactggttgtagagcttcggcaggtcgcggtaagagttgatgatcttctggtaatgctcgcagaagagaatctcactcgtcgggcgtacgcacaggcgctcactcagcttctcgctgccgccttccgttacccaggccacttcaggcgcaaagccctttacgtggtctttttccttctgcaggagggattccgggatgaacagcggcatgtaaacgttctggtgacccgtcgccttaaagcgatcgtccagttcatgctgaatgttttcccagatcgcgtagccgtacggctcgatgatcatgcagccttttacactggagtaatccatcagctcggcttttttaacaatatcggtgtaccatttggaaaagtcaacgtccatggaagtgatgtcgttgaccatcttcttctgattcgccaagaaattcagtcctttcacgattcgtgcggcaaacgctgtgccgccgggcccaaagcgggcatattgtttcttattatacagggaattttcctgaaaagcaagagcggcagccatctttatgcgggccgcctaagattttatttaaaaaaacagaaaagaaggttcgtttcttctttccttgtacgattcggtgcaatttgtaccaaagatacttatacataaataattcaacaaataattcaaagttaacttaaactaatttacaggaacagagtaccaacaaaacagctgtccatcggaataaattaaatcagcgaaaaaaacaccgggaacagccagaaagccgctcccggtgttttcatatcgttttgcacaaggcgaaaaatttcacgcagagcgcaaaaattactgaccctgatgttcttcgatgaactgaacgatttcgccaaccgtcttgaggttttcaacttccgtatccggaatttctacgttgaaagcatcttcgatggacatgacaagatcaacaacagcaagggaatctgcgtccagatcctcaaccaggttggaatcctcggtgatctcggagggatctacgctgagctcctcagcaataatatcgataactttctccagaaccatttaattttcctcctatcgtgtagtatttgtcaagtactgcaccgtctgccgtatggacaaaacgccgcaggcatgatacaatcggggtgtacttcacatacattgtatggatgcacggcttatttgtcaatagcaattccgcattccgtgctaaatttttctgtttttaaaggagagccttaaaatgcagcttcgccgttttgccgtcatcgggcaccccatcgggcacacgatgtcgccgtttatccatgatcgcctcttctccctcacaggccataagccggaatattccgtgctggatgtaccgtcccttacacaggcgctgcccgcattgcgcacgctcgacggcttcaatatcaccatcccccacaaaagcgacatcattcccctgctcgacggtatcgatgaaaaagcgaagcttttcggatccgtcaacaccgtgcgtgtcgaagacggcaaaatgaccggctacacaacggacggtgtcggctgcaaaaaggcccttgcgcgctatgggctcgattttaacggcgagcttcttctgctcggccgcggcggcgcggcgcgtgccatcgcatttgaagccgtgctcacggccgatgcaccgcatcttgatatcgtctgccgcgaaagctcgctcgaaaaagcacaggtgctcagcgatgaactcgcggagctctgccgcacgcgcagcaaaaccggcgtgttccgcgtgctgtcttatgacgagctcgcaaaggaaaccgagcactacgatctcgtgctcaacaccacaagcctcggtatgtaccccaaaaccggtgtcagtgctgtcggggaagacgtgctctcccgctgcaaagccgcgttcgacgccgtctataaccccggcaaaacgaaatttttaaagcttgccgcaagctgcggactcaaaactgtcggcggcatgggcatgctcgtctgtcaggcggtcgccgcgcacgagctctggtacggcgcgtcgtttaaggacagcgatatcgaacagctcatctgcgatgcggaagcggaaacggcacggcttttccgcgcataacgaaccgaaagaaacggggaacgggaaatggacaaaaaagtaaaaggtgaaatcataaaatcgggcaatatcgttttaagcggcttcatgggcagcggcaagaccacggtcggccgtcgcttggccgccgcgctcgatatgcagtttgtcgatatggacttgtacatagaaaagaagaccggcatgacggtcaaggagattttcgcagaatacggcgaactgcattttcgcgcgctcgagaccgagaccgtaaaggagcttgcgcaaagtaatcatttcgtcatcgccacgggtggcggtacgctgatgcagccgcagaacgtagaaggctttcatcaaggcggcggtaccatctattatctcgacgtaccgctggccgccttgcaggagcgcctcaaaaacgataaacgccgcccgcttctgcagacgccggaccgccgcgcggtgattgagcgccttttaaacgagcgccgcccgaaatacctcgcaagcgcggacgtcgtcgtcgacgccggcgcgcccacggttgtcgttgtagagcgcatttgcgccctgcgcggcgagcccattgaaaaagcgaagcgcaaaaagccgggaaatacctccgaaaaggagcagcctcaaaagaagcgcttccgcagaagaagacgcaaaaaaggaacttctcccggaacaccgcaagaaaactcttgacaaagcgcccgcgcggcggtatgattttaacacggcgatgcaggatagataaagcaaacctgcaaatcgcaaagcaagagtcacatataggatggttcaaactatgcagtccgttttattcacaagacgatttacaaagtattttagcgcacgattttataccgtgtgcttttcgtcgtatgtgaatataccgggcaacgcttgaaaacgcgcggaaaatttctgcgcggaggaatttgaagtattctgagcagtataaaaccaagcggagccaatgggcttcgctttttttgtgccgagagcggcagcggggcacggctcctataaaagaaaggtaagggaaaaaacatgatcatcgtactcaaagccaaccgcagtgaagaacaggtcaaaaacttcatttcgaatctcaccgaccgttatgacgtcagtgttaacacatgggtcggcacacattccaccgtgctcggccttatcggcgataccgctgcggtagacagcgagtacatcgccgcacaggatattgtagaaagcgttaagcgcgtgcaggagccgtataaaaaagcaaaccgtaagttccatccggaagatacggtcatcaagcttcctaccggtcaggtgatcggcgacggttcccttgcgctcatcgcgggtccgtgctccgtcgaaagcgaagcgcagatctgctgtgttgcagagcgcgtcaaggccgcaggcgctacgttcctgcgcggcggcgcattcaagccccgcacctcgccgtatgcgttccagggccttaaggcagagggcctcgagctcctcaaaaaagccaaggaaagaaccggcctgcccatcgtcaccgagattatgagcatcggccacctcgacctctttgaggacgtcgatgtcattcaggtcggcgcaagaaacatgcagaacttcgagcttttaaaggagctgggtcacgtgcataagccgatccttttaaagcgcggccttgccaacaccatcgaagaacttctcatgagcgccgagtatatcatggcgggcggcaacgagcaggtcatcctgtgcgagcgcggcatccgcacgtatgagacattcacccgcaatacgctcgatatttccgccgtgccgatcttaaagcgcctttcccacctgcccgtcatcgtagaccccagccatgccagcggcatcaactggcttgtcgagccgcttgccatggcagcggcagccgtcggcgcagacggcctcatcatcgaggtgcataatgaccccagccgtgccctgtgcgacggcgcacagtccctcacgccggatcagttcgacgtgctcgcaaagaaagtgcagaaggtcaccgaaacggtgaagagcctgtaaaaatttacccgaaagggagaacgatatgcaaatcgcaatcattggtctgggtctcatcggcggttcgctcgcaaaggccctcaaagaaaatacagagcacaccgtcatcggctttgaccgtgacgaaaacaccctgctcgacgcactttccctcggcgccatcgattccgtcggcagcacgtctttgctcgaaaacgcggacgtcgtgtacgtctgtctgtatcccgcagatgtcgtgcgcttcgtcgaggaaaacgcaccgcattttaaagaaggctgcattgtcacggatgtgtgcggcatcaaaaatcaggtctgcggcaaattaacggagatcgccaaaaactacccgttcgtttacgtcggcggccaccccatggcgggcaaggagcgcagcgggttcgacgccagtgaggcaagcctcttttataacgcttcctatattctcgtgcccggcgaagctccgcaaagcgccacagataccctcgtgtcgctcgcaaaaagcatgggctttggcaccatcaaatactgcacgcagcaaaagcacgaccgtatgatcgcctatacgtcccagattccgcacgttttggcgtgcgcttatgtcatgagcccgcgctgcgatgagcacagcggcttttccgccggcagctaccgcgacgtttcgcgcgtggcgcgcatcaatgcggagctgtgggcagaccttttccttgcaaaccgtgaggaattagtggacgagacggaagaactcgtgcgcaatatagaacgtatacgtgctgcggtggcgaaaaacgatcgggcagagctcgtggcgctgctttcctccgcacgtgaaaaaaaggagaaattcggataatggtgatcgaaattaaaacagataaaccgtatgaagttattgtggaagacggcgttttggaccgcgcgggcgaaaaaatcgctccgctcgtccgccccggcagccgcgccatgattgtcagcgagacgaacgtcttcccgatatacggcgagcgtctaaaagcttcgcttgaaaaagcgggtatccacacggcggagttcgtctttgaagccggcgagccgcaaaagcagctttccaccgtcatgcagatttacgaagcgcttgcggaaaacgatttcacgcgcagcgacatcattgtcacgctcggcggcggcgtggcgggcgatatgggtggcttcgcggcggcaacgttcctgcgcggcattgatttcgtgcaggtgcccacgtcccttttggcgcaggtagatgccagtgtcggcggcaaaacgggtgtcgatttgccgttcggtaaaaacctcgtcggcgcgttccatcagccgcgcctcgtcctcgccgatcccaaaacgctctccacgctgcccgatgcctatttcacggacggcatgggcgaggtcatcaaatacggctgcatcgcagacgccgcgctgttcgataaattggagcagggacaagtcatcgaccatttggaggaaaccatttgccgctgcgtgctgtgcaaaaagcactttgtcgaggaagacacgaacgacaaaggccggcgtatgattttaaacttcggccacacattcggccacgcgctcgaaaagcttacgggcttctcgtcgctttcgcacggccttgccgtcggcatcggtatggtcatggcgggcgaagtgggtgaaagtctcggcgtcacggaaaaaggcaccgctgcgcgtatccgccgcgtgctggaaagctatggcatgcccaccgagtccgcgtttgatttcgccaaagttgtggaagcaaccgcgctcgataaaaaaagctttggcaaaacgctcaacctgatccttttaaagcagatcggcgaaagcgttattcacccggtggacagaaactacctcgtactgcgctataagcttgccgccgagcagaaccgccgcagaaaattgaattgatttttaggaaggcagcatcattctcatcgtgctgccttatgtcaaatatagagagataaatttatgcagaaacaaggtgatactatggcagaggtgacctaccgccccgcccacgttaagggcgaagtgcgcattcccccaagcaaaagtgccgcgcaccgcgcattgctttcggccgcgctgtgcaaaacgccgtgccgtgtcgggcccattgaccacagcgcggatatggaagctacattaaacggcgtgtgcgccatgggcggcacggtgcaagcggaagaaaacggcgtgctgtgcatcgcgccgggcacggcaccccaaagcgtcacggtcgattgcggtgaatccggttccacgctgcgctttctcatccccgttttcgccgccctcggcatcgaagcgacgtttgtcggtcacggcagacttcccgagcgccctatcggcgtttacacagaccttctgccgcagcacggcgtaacggtcgagactgccggcggtctgccgtttcacatcacgggcaagcttcaaagcggcgatttccgcgtcccgggcaacatcagttctcagtttataaccggtttattattcgctttgccgctgctcaaaaatgattccaccgttacgctgaccaccccgctcgaatccaaaggctatatcgatttgacgatagaggtgctcgcgggcttcggtgttaaaattgaggagaccgagaccggctggcacatctccggcgggcagacgtatcgcgcagagcactataccgtcgagggtgattggtcgcaggccgcgttttttctctcggaagccgctgtctccggcggccctatccgcctgctcggtctttccgaaacctctctgcaaggcgataaagcctgcgtccgtctctggcggcagttcgggctttctgtcaccgaagaaaacggcgtttatgttgccgaaaacaaaaatatggataagccctaccgcggactgcacggcatcgcgattgacgccgcgcaaattcccgatatggtgcctgcgctcgccgtcacggctgcgttcgcggagggcgagaccgtcatttcccatgcggagcgattgcacttaaaggagtgtgaccgtctgcttgccatggaagcggcgctcaaaaacctcggtgcagacattaaagccgtgccggacggccttatcatccacggcaagcccgcgcttacgggcggcaaagccgagggcatgaacgaccaccgcgtcgttatggcgctcgctgccgccggttgtgcgtgcacagttaccgtcacggacgcggaaagcatcaaaaaatcctaccccggatttttccgggatcataaacatttaggagggatcgccgatggcatcgacctggggtgaaaacatcaagctgtccattttcggcggcagccatacggaagcaatcggcgtggtgctcgataatctcccgccgaacgaaaaaatagacatggaaaaaattcgcgtgcagatggcgcgccgtgcgccgggtaaggacaagaccgccaccacgcgccttgaggccgatgagccgcaggtgctctcggggctcttcaacggcgtcacaacaggcgcgccgctcgcggctatcatcgcgaacaccaatacgcgttcgaaggattattccgatttaaaaattcacccgcgtcccggccatgccgattacaccgcgtctgtccgctacgacggcgcaaacgacattcgcggcggcgggcatttttcgggtcgtctcaccgcgtgcctcgtgttcgcaggcgccgtctgccgccagatattagagcgccgcggcatcacgatcagtgcgcacgcttatgcggtcggcagcgcaaaagataccccgttcgatcccgtaaacgtctcaaaagacgacttaaatgccttaaatacccgcttttttgcggtcaattcccccaaggccgaagaaaaaatgcgcgccgagatcgaagccgcgcgattggacgcagacagcatcggcggcatcatcgagtgcgccgcagtcggtgtcccggcgggcatcggcagtcctatgttcggcggcattgaaaacgtctttgcatcgattttatacggcatccccgccgtcaaaggtgtggagttcggcgcgggctttgatgttgcctgtatgcgtggcagcgaaaataacgacgcgttttactacgacgaaaatggtctcgtccgcacgaaaacgaacaacgcgggcggcattttgggcggcatcacaacgggcatgccgattctattccgcattgccgtcaagcccacgccgtccattggccgtgaacagcacacggtcgatctcaccacgaaaacaaacgccgatttaaccatccacggccgccacgacccgtgtatcgtcccgcgcgccatccctgtggcggaagctgcggcagccttggcgctgatggacttgctgcgttaaagagaatagaaaggagcgagcaaaatgagtgaaaataagtcttttgatgaactgcttttgccggttcgcaacgatatagaccgcattgataaagagcttttaaagcttttcacggagcgcatgcagtgcgcggagcgcgtcgcggagatcaagcgcaaggcgggcattcccgtcttaaatgccgcccgcgagcaggtcattttagaccgcgttaaaaaagaagccggtgagtacggcgacagcgccgtcgcgctttacagcgccatcatgagcatcagccgcgcccgccagcacaatatgctgaaaagcggtggggtattgcgcgacctcgagcaaaattccccaaagacattaaaagctgacccgcgtgtcatttgtcagggcgcggcgggcgcgttttcccacagcgccgccctgcgcctgtttccggggcagaaaccgatctttttgcccggtttccgcgatgtttttgaagctgtccataacggcgcgggcgattacggcgtggtgccggtcgaaaattccgatgccggcagtgtctctgaggtctatgacctcatcatgaagcaccgcatgttcatcgtcggtgcggcggatattcccgtgcgccactgcctgtgccgcgcaaaggggacgggtgcggtcaaaaaggtgctctcgaagcacgaggccctcgtgcagtgcagtgcgtatctcgcggcacacgtcatcgaaaccgaagcctattccaacacggcggccgccgcaaaattcatcgccgaaacccgtcccgagggcgtcggcgcagtctgctccgcgcaggcggcggcggaatacggcctcgaagtcatcgccgccgatatccagaataccgataacaactgcacgcgcttcatcgtcatttcgcgtgaagccgttttgcccgaagacgcggaaaagatcagcctgtgcttctctctgccgcacaccccaggctcgctgtgccatacgctggagcgtttcgctctgctcggcctgaacctcacaaaaatcgaatcccgccccatcccggagcgcaatttcgagtatgacttctacctcgatttcaccgggaatgttcacgatgtgcagacacttgcgctcatctgcgccctctccgacgagatgccccgcttctcgttcctcggaaactacaaagaaagctgagttaaaaatggcagttaccttcatcaaagtcacggaagaagaacagattgaaaaaatagccgagatcgccgcacccatctggcacgagacctacgactgcatcaacggcgttgcgtccacggattacatgatcgaaaaattccagtccgtcccggccatccaccgccagatggaaagcgagggctacgtctattatatgatgctcgacgacggcgtgcccgcgggcttcatcggccttgtgccgcacaaagagggcaaaatgttcctgagcaagctctacgtttccgccgctcatcgcagccgcggcctgccgcgcgccgcgttcgatttcatcgaaacgctctgtcaggcggaaaagctccccgcaatctatctcaccgtcaacaaaaagaattttcacgccatcgaagtctacaaatacttcggttttcatcagacggacgccgtcgtcaccgacatcggcagcggcttcgtgatgaacgactatatcatgcagaaagacctgtaaacgcaggtcgcaatatgccaagctgcaattttgtgcccgttcgtatccttgacaaaaaataaaaacggaaaacattgcgaacggtgtgcaaaaatttccctcggccgttcgctttttctttctttttcggaaaatctgtgctatactaaaaacaacattttaccttgagtggggtatacgcatgagcgagagaaaagaagtctatgttttaggccaccgcaatcccgacaccgattccatttgttcggcgatcgcctacgcggacgttaaaaataaagaaaatgacggaaatcactatgtcgccgcccgcgccgggcagatcagctccgagacaagctacgtcctccagcgcttcggcatgcgccagccgacctacgtcaacaacattggcacccgcgtgcgcgatatggagatccgcaaaattcccggcatcaacgagggcatttccatgaaaaaagcatggagcatgatggcggagatgaacgccgtcacgctgcccatcgtcgatgcaaacaacgtgttagacggcatcatcaccatcaacgacattgccacgtcctacatggaaaatcaggacagcaccatgattgcaaaggccaaaacgccgtactgcaacattttggaaacgctggaagccaaaatgctcgtcggcgaccccgatgccgttttcgagcacggcaacgtcgtcattgccgtcgcaaacccggacgtcatggaaaactacatcgaaaaggacgacatggtcatcaccggcaaccgttacgaatcgcagctttccgccattgagtccggcgcgggctgtatcctcgtctgcctcggcgcagaggtctcccgcagcatccagaagctcgcgcgcgacaataactgcgccgtgctcactacgccgcttgatacgtacaccgttgcgcaccgcatcagccagtgcatgccggttaaggcgttcatgcgcacgaaagatctcgtcacgttcaccccgagcgattacaccgatgccattaaagataccatgcagaacacccgcattcgcgatttcccggttatcgataaaaacggcaagtacgtcggcatgatctcccgccgtaacttgcttggcattcgcaagcgctccgtcatcttagtcgatcacaatgagcgcagtcaggcggttgaaaatatcgaaaacgcagaaattttggaaatcatcgatcaccaccgcatcggctccctcgagacgatggcgcctgtgtatttccgcaacgagcccgtcggctgcacggcgaccatcatctattccatttataaagaaaagggctttaaggttccgccgcagatcgcgggtcttctgtgcagcgccattttgtccgatacgctcatgttccgttcgcctacctgtaccatgctggaccgcgccgcagcggaagcgctcagtgccattgcgggcatcgattgccagagcttcggtatcgaaatgtttaccgcaggcagcaacctcaaggataagactccggaagagattttctatcaggattacaagaagttcgagttcggcgacgtcacgttcggcgtcggccagatcaacagcatgagcggctccgagctcgatgagctggagcgccgcctgcgtccgtacctcgaaaagtcctgccgcgagcacggcctctccatgatgttcttcatgctgacgaatatcatcgaggagtccacgcgcctcatgtgctacggcgagtccgccgatatgctcgttgaagatgccttcggccgtgcgccgaaagcgggcaccatctggcttaaaggtgttgtctcccgcaaaaagcagctcatccctgccttcatcgatgccatcagcaaagaagccggcggcggtgtgtgattttcctcgcgtgccctctccgatttcggctatatggccgattggaccatcccgagacacgatcgactgcgtttcgatatcatgagcggcaaaataaacgaacaattcatgagaaaagggtcggcccaaagcggtcggctctttttgcatacagaaaattgcgaaaaataaaaaataggactggatttttttgaaagactgtgttataatgtttgctgttgaacagaatatgggcccgtagctcagctgggagagcgctgcgttcgcaacgcagaggtcaagggttcgaatccctccgggtccaccaaacaggtattggacgaacacctatttcttcagcggcggtttcgccgtaaagtgttcgctctgatccacaacagaaaagcgccgtcttggaagtgattccgagacggcgcttttcctgataccaagaaaacatttagatgtctcggatttgttagaatcaatccctattaaggtgtcaaccctcaaatcatcttttctcatacctctgctaaaacggtgtcccgttaatagaattgggtggatttttcaaaaaaacatgctataatatatactataatggtttaatgtgatttcagtatgagcttcagaaaggaaatagttgaaatgtatgatgctttgacagttgccgaatatgtgataaaatattcgactttaagtggcatgcctgttagcaatcttcggcttcaaaaagtgttatattttattcaagccgaatttatggtttctacaaatagtgaatgtttcaatgatagaattgaggcgtgggatcttggccccgtcgttccaacagtatatagaaagtataaagtatttggggcatcttcaataccgatagacagtagtaaggatgctgagagagctattaatagcgaagatagaaaaatgatgaatgaaaccataaatcactgcaataagtattccacttctactttagttgaaataacacacaatcaagatccttggattaaagcacgaaattcttgtttctcaaaggtaatctctcctgaatctctatatgaatatttcaaggaggaataaaagtggcaatcagtatagaaaaaacggatgcccaagttacgctctgcaaagacgaaaaaagtgaaaaagttgaaaaaatgaaggcagatattctatcaatttgccaaaccatatcctcgccaagcagtaaatttgaagcaaaggttgcttttaatgaaataaaaaattatgtgcatagttacgatagattgttgtatgctgagataagcacatattgttataacctagaacctgaaggcacggactcctttcaaggaaatctaaactctttaatcgaatatgtgtttagccaagactatgaaaacggtttaaaggcggaacaaggaaagaaccaccaagtcgaagtagaattacgtgaacgttcaaaacgtgtagtagtaaagttatatgataatgtaaatctcgcttgtgcacaaatgagttcgttaaaacagtctaaagaagatttacacgagcattttatttctgaatttgaacccgcaaaagccgacatcacaaaagacattagttcacaactcataacgcttgtcggaatcttcacggcaattgcatttttggtttttggagggtttagttcgctaactgatatatttgctcatatagaagacaacattataaaaacagttatgcttgcttcaatttggggcttgattgtttgtaatggagtatttatatttcttagttgcatagaaaagatagcaaaaaaagaaacggctgaattgtataattatagcgtgttcaaatggacaaacatcatccttctttttgcgtttttcaattcattatgggcttatattgtcgataggtacgattggggctatgcgattgtcaaaatcggtgaaaaagcaagcgagtatattgcgattattggttttgcccttattttattagttttcgtaattgctgcacattgtatctttaaacgcaaaaagaagtagataggcaggagaatgtctccttaatcttagtgctattttttcaagcacttttatctaacttggattgcgtatctgctaaaggcgtgcaatccaagtttcacatccgcacattcgatttccgctaattctcctgctacaatggttgcagaaaggaacaggaggttatacgaatggagagatttatcacagatgaacgcacagggctgaagtatgagctggttggagactattatctgattgctggggatgatgagccggaggaagagcggccaatcggggtatgggggcagcggcatctccgctatctcaaggagcatcaccgtgtgcgctatgccaacctgctgaccagcggtaaattgaacgcctatcttgcggatattgaccggcaggcggaggagctttttcttcggctggtaaagcaaatggcagatgctgagggcattacggaaacgctgaaagccagcgaccaaatgaaatgggtcaggcggatgaactcctgccgagaccgtgcatccgaaactgtctattatcaagtaatctatacataaggcaaggcccttcgtatcaagtcaagaaaatgatacgaagggtctctttttgcttattgcgctttcaaaaatccggattcaaacgcatcggggaaaataaagcgcttctcgccctgctcaaagcggacggtcacatatcccctgttcagctcgatcaccttgccgatgccgaacttagcgtgagccacagcgcttccaacggcaacgctggaaacatcgaccttcggtttttcgggatgctggggctttgcgggggcgatcggagatttcacgccgaaggcagcagtgacaaaatccggcttagccggtggtgtccgagttggaacgggggctttgggcggctccggctcctcgtccgcttccgaaacatcggcttcgtcgatttccggcgcattcatcgtagactgctggttatagaacagcagctcgtactccttgcgcttcacgacggtatcccagccgccgacatcctcgttttcgtgcttgtccaggccggtgtaggacaggctggaatcctcatagcgcttgaatttaaagatggcatcattcatcaggctggcgttaaatacattcagctccaccagcagattgaaatccttcacatccagaccggtcacttttttgaagagccccggttccagctgcgtgatcacatccttcagagatcgctcccggtaatccgtcagatacataaagatcggcacacgggtggcaaacttgatgagcttctcctgaatctgctttcgcatggatttgtattctttttcttcctcggagatttcctttttctcctccttggtgagctccttgcctttttccttcttggcctttttcacgctctccgatttgttgatgatggtctcgatatccgagttcaggctgcggaacccttcgattttcatcagggcctccatggcctctttgtttgccatcagtcgccggagtgtgtcattgtccacattgaccagcaatgcagattcccagcgcttggccagcagtgtggccgaggtaccggccatggcgatatccagaatatcctgtgcgtcgatctgcttcatgctgctgccgtcgtaggccagtacgggcaggaagttgatgaattccgccaccttcttttccgggttgctttcactcacattcaggcggcaggaataatccgagatctgcttgagggcacggtccagcgcaaagtcaaagacatagcactcatacttcatgatctgatcggtgccggagccggtacgcaccgtccacggagactgtacccggaacgccgcttgaaaataggtctccgggcttttcagattccgcagcataaagatgcccgtccatggcttgaccgtgacgccggtggtcagcttgccgcaggacagcgtgatggtcttggtggtcagcgggtcacccatggatttctgcaccggctccagcgcatccacgccaatgcccgccttggctccggcacagacattgatgtggtaatcgtggtaaaagctgttctgcttctgctgaagtaggttatacattgcatagcagctggccacattgggcagaaaccagaaggtgtgggacagcacattcagcaaccgggtatcggaaaacggcataggcgggcgcttgtcctgacccagcttcatatcgtccacgctggccgggagataagaccctcgaatcaggtccagccacttctgcacctcgttctcatagacaaaccgggcggtctccggcttgcttttctcgccgtatttggcggagaaaaatacattcaagtcaaattcgtcgaactgaccctgcatggcgatctgccggatgctgtccgggatgcggtaggtcatcatcaccatccggggcagcgctgcataggggttgtccgcagccccgtcccagttttccttggcccgctgctcgtcggaataggtccagttgtagatttgatcctcgataaattcgccgctgttgatggcgcggaacggcgtgccggacaagaacagatagtaggatgtggtgatgggcaggaaggtctcgttgtaggcgttgtcggcctcgtccttcttgtacttctccatatcgaagtcgtaatcctcgtcctcgttgtccatttcaaagagctttttggcattgtcccgccacgcgccgaaatggtattcgtcaaagatcacgatgtcccagttggtggtatgtacccattcgttctttgccttgatgccgccgctctcgttggtgccgagatagtcctgaaaagagccgaagcagacgatggggtgggacaggtcggcgtcctcatagcgcattccgtcccggcagatgaattgccagccctcaaagtctttgtgggtcatgagatcttcctcccacgccgcctcaacagcaggcttgaaggtcagcacaagcaccttttttagccccattcgtttggccagctcataggcggcgaatgttttcccgaagcgcattttggcattccaaaggaatttcgtcgcacggtccggcgtatccagcttggcggaacgaaaataggcgatggtcttgttgacggcctcctcctgctccgggcgcatggaaaaggtgcgggtgcggttctcctcgttgagggtgtcggttttcaccgccagcaccgccgcttccaactcatccaccgtgcagcggaaccattcgccgcccacgccggtgattttcctgcggcggagcatacgatgcacatcgtggtcggtaaagcaggagccgtcctcccgcatggcggagctgcggtacaagatctcataggggagcttgccgtccgggcgcttggtggggtactgctgcgccacacgcctgttcacatctttttcggtgtagcccaccttcagcaggccgtcataatccggacttaagtcccggtaggcatagatcatcggatggactgcctggcgttggggaaagaaatccatttgcggcattagtcctcacctccggtcaagtccatcggtcggatcatcgattcaataaaggcgatttcttcatcggtaagaccatacttagcataaagctcggcatcagtccaaggtttggagaagtcttgttggggaactaattgataaacaccctttgcagcgttttgtgagttctttttctgcaagacaaggaatctgaaaaatcttgtggctatgtacgacatcacattttcgcattcctgtttgtctttgaatggcccaataaccaaatagctttcgttgcaaactgtatcaggagccccgtaaaatggttttggaaggatagggtgcggaaatgaatcactgccgcttcccgcctttgcaatgtacactttgtgccaaccaatcatttcggtaccacgggaaattacatttcttgcaacatatgctgcacttccacgcacttcccggtcgtttccgcttacatataccaatagatcagaaggcgaattcttgactttgtttcccttgaatgtatttggaaggccaaacggaagtctggtgctaaccagcgtttccatcgacagttcgttctttgccattaccttgtgaataacactgacggcttcgttatagcggatgaaggtgccacaaccggcctcaagcaatggcctgataatcggcccttgtaccgcatcacccttatgtgaataaacggagcagtcaccgtgttcgtctcgattccacagaaaatagcaaacaccgcccttgatttgaactccagaaaagcaatcagaagcttcgggataatcgtgtattactcgtattctattatcgttcaacattcggtctcgaaattcgtctaatcctttgccaccggcaaaccatctggacggaattatcatagacaaatagcgggggttcactttttgcgcttgctgtacgaataattggtaaatcggttttgcacttgctccgttaccgcccccgtcactcaactgatacggcgggttactgatgatcacatcgaacttcatcttaaaaatatcctccggcttggtggtatggatcagctcataggcgtgggtctccagcatttcgtcccggtcgtactggctctgggctgcgccgcaaaagacgcatttcccgtttttccagcggtggggaatccgcttgtagcgaatgttgccctccgcatcgtcaaagcgggacaccgaatacacgctgttggggtacttgctgcaatacacaccacgacgggagagcaggctggtcagctcggtgatggcgataccgtaaagctggtgatgaaagatgtggtcaatacgctgctgcaggtcgggaaggatcggttccaatccggtcagcagtcgcttggcaatctcccgcagaaagacaccgcttttgcaggccgggtctaaaaacttggtattggggtccgaaaacaactcctgcgggagcatatccagcatcgaattggctacctccggcggcgtgaacacctcatcgttggacagattggcaaggcaggacaacacatccggattatagatgccggagtagaaatcattgctcattttcccataccctcctgtagtgcgtcacatatttcttgaggaactcgccctcgtcgctgggcttctcggtgggttcgtccgcgtcgaacagggtcatctgctcctctcgctttttacgctttttcttgccgaacaggtcacgggcctcgtcatctccctgcatcagcctggcaaaggtgtagtcactgcgctggagctgatagccggtcacaaaggcccattcggaaaacacaatgggatccccagtatcctgctggttttcatccacgcacatcaggctcagggcgttgccgcagacaatgttgcgggacagaataaatcgcaccgagcggcggcagtcctcgctgacttcctttttgcagacggctttgtactccttatcccacatccgataaagccgctcccggcaggcctcgcagttgtcctgcagaatatccacaccgtacaggctgctgacggccagaacggagtttttttcgtagtccattgggaacttcttgtatttcttttttacaacagccaacttccgggacaggatctcggcgagaaaatttccatcgccgcaggcaggctccagaaagcggctgtcgatgcgctctgtctcggttttcacgaggtcgcacatcgccttgacctcccgctcggcggtaaacacctcgccgtggtccgccacccgctgtttggattttacttgctttgtcacgcttttgatccccccggaaacataatcccgattatgttgtaaacatggcagcaaaaaagacctgccgcagatcggacaggccaaaaagggtatgaaaaagcaagccttctcttatcgcttcaaaaagcgagccggaaaggctttcttgttgtgctcgattttagacaattttagggttttcgcgcttttcgtcgatgctttctttactttttcgcaggttgatgctataatacaatatgtataggtatgcttctatcaaaatgaaactacaacataatcgggattctgttgcttataaaattaggtgcatattctccatgcggcggcggtgctccgtgccggtggaaatgatatagatgcgggtcgtatcgatgcttgagtgaccgagaatgtcggcaagcttggcaatgtccttttcgatgccgtaaaacacccgggcgaacaggtggcgcaggttatggggaaataccttctccgggttgacacccgcttcctgacacaaggatttcatctcccgccagatatttgtccgattgatgggcttgcccgtgcgggtcacgaaaatcatcccgctttcgattccttgctccgctgcatagcggagcaatttttgcctcagcgccttcacaagaaacaccgtccgggtctttgccttacagcttaccaccgcctcgccgcaccgtgctgcctcaacggtgataaattgcagctcactgactcggatgccggtaccacagatggtctgtaaaatcagacagagccgttcattgtgctttcgcatcgctgcccggcagagccgtgtgtattccgctttcgtcagttccttttcttcggggcagtaaacctgctgctgcaatttcagcgtttttaccttcaggtcgtgcagccgagaaaggtgaatagacagttgatgctggccaacatggagtttacgctccgcacggcgtagatttcttgcaggtgctttttgtatgcgatcacggtttcctttgtaatttctccatccgatgcgtatgccgcaaaggcgcggacatcccgaacatatttttcgactgttgcggcactccattcctctaagacaagatgttccgtaaattcggcgatctccgccgctgtgagtaatcgtcccttcatcgtggatttacctccgagtattttctgattattctacccgaaaagtatgaaaacaaaattgtcaccgtttattgtaagaaaatcggtgacaggaatcgaatctatggattttcgttcagccccggtgcatttcaggtttcctgatccgcaccggggctttttcattttctgagcttgtagggatttttattggacagcaactatgctaaaattatttttgaaaagtaggaacaatcggcgtttgcttatgccgttaaaaatagagggcgctggccctctggaaaggagacgataaaaatgccaattatgctgaccagaaaggacggaccacctacgccgttccgaaacgcagagtacatcccgttctactacttcatcccgaaaagcatcctgtcccgctgtggagcggagctgaacgccatcccgaggaatccgcaggagctatttcacaaccgggccgcctgcgaattcgtggagagcgacctgttccgactgctcatcattgacgccaccgcctttatggtttggccgtatatgggcttcggcgagtatatggaaatttactccggctacgacccggcgtggcggtttgcccactgcccggactactggatccaagagctgacggacgaaggcatcttggcgtccgccggcgaattattcaaaggttgccactcggaattgggatatgtgccggaatggcagatcgacatctatctgcgctacatcgtgcccaatgtgatgaaaaagcaccggatggacgagatcatccaagcggcacgggagtacccctgctttgaggactttgacttccgaaagagcaaccagaaaacggacttcatccgaaaatggtaccacacccgcaccaagcacccgatgatctcactggaggaatttcaggaggcctatgccgacgcccacggcggacaggaatacgaggagcctgacccgtcgcagaatgtggaggaaacagtagtagcacaggcactggtggatcagttcaaggccacgctcagcgaaaaggatatgcagatccttgaactgcgtatgaacggcgacacgctggaggagattgccgaaaagctgggctacaaaaatcacagcggcgtgctcaagcgtatccgcaagatcgggcaggcttatgaagcctacaccggtgtggactacggctttgagaatgacaagatcacaggataacacctatcggaaaacggtaggtgttatttttatgcccaaacggaggtggagattatgaaatggagaatatacccgtcccagcgagggcgggtcaacaaactggtgcgccggcgatgctgctgctatgaccacggcaactgcatcctgctggatgacggagaagcacatcgctgcgtgcagatcatcagccggagcggcatctactgcaactatttccgccgggcggtattgccgtccgatagtgagttatacgcacaaatcagagatcagaacgaatgaggaggatgaggaaatgaaaacaatccacaacacaaaaatcatcggcatcgaccacgggtacgggaatatgaaaacagccaactgctgttttcctacgggcatcaccgcctatgaccacgagccactgttcacggcggatatgctggtctacggcggcaggtattatctcatcggcgaggggcacaaggagtttgcgccggacaagatcaaggacgaggactattatgtgctgactcttgcggccatcgccaaggagctgaaagccgaaaatctcaccgaggcgcacattgcgattgccgccggtctgccgctgacttggacaagcgggcaaaaggcagattttaaggcgtatctgatgaaaaatgccgaggtggagttctcctacaaaaaggcggactaccacctctatatcgacgatgtgcgcatctatccgcaggggtatgccgctattgcgagcttcgcaacgactcttaaaggcgtcaacctgattgccgacatcggcaacggcacgatgaacaccctgtatataatcaacggcaaaccgcagcagggcaaaatgttcaccgagaaattcgggacttaccagtgtaccctcgctgtccgtgaggcatttatgcagaaaacgcaacgggagatcaacgacgccatcatcgacgaggtgctgatcaccggcacggcaaatattgcgcctgccgacctgaaaatcatcaagggcgtcgctgccgagtatgtgcgggacatcttccgcagacttcgtgagcacggctatgatgagaatacaatgaccttgtatgtgacgggcggaggcggctgccttgtgaagaacttttataagttcagcgccgaccgggtgaaattcatcgaggatatctgcgccgccgcaaaggggtatgaatatctggcggaaacgcagatgaaggctgaggcgaagggatgaacaagtatcggatcaatgtgcggtttgatttggacaagccaaaagaggcgaacgccgcacagtatttacagtcgctggataaatcccgcaacgcttttatggtaacggcggtcttaaacgaaatgcagcggcagtcatccacaaatgagtttttgctggatgatattcggcaggtcatacgggaggaactgcaggaggtgtcgtttgctgcggcacctcctgtttttgagcaggtacaaccggagctgaccgaggagcagcaagccgaaaacgaaaagagtgtgctggatgaccttgaaatgttcggctgagccaaaatgccgatatgtggctcaaatcgcagcatttgaagccgagccagtgccactttggcgcaaagacaggatgcacccaaagtggacaaaaagcggttttcagtatccgtcagccgcttttctttttaccctgcggggtgcgtctcacggtatagcaagcagggactttgtgtgccaaaaaagtcccaatcacagccgaaatcggctgactctttgggggagcagcccccaatcccccgaaaggagagatatatatggggaaagatatgcgcattgccgtccgtgtgacggtaagggagaaggagaagattcaagcaaaggcccgaaaatgcgggctgagtacaaccgaatatgtgaagcaaagagcgttgaggtacgaaccgagaacggttccgcctgacgctctttttgcttgccttgaaaagctgggcaagcttgcggataaagcgagttcaccggaacttgacgagggaatttatacggtgctgaagcagatcacagcagaattcctgctgccgggaaaagggtgatgcagtatggcggtgacaggattctggcctgtgttcaaaaacctgaaggccacactggactacgccgacaatcccgacaagaccatcgccccggaatatctggacgaggatttgtacgccgccctgcgctatacagaaaacgacaacaagaccgaccgtcaggtatttgtgggcggcatcaactgctccaagcagaacgcctatgccgagatgatcgctgtccagcggcgattcggtctgcgtggcaaggtggtgggctaccacggcattcagagctttcgtgagggcgaggtcacgccggagcaggcgtttgccattggcaaggaaaccgcaagaaagatgtggggtgacaaatatcaggtacttgtcactgtccacctgaataccgacaatgtgcattgccattttgttgtgaatcccgtgtccttcagggacggagcgaaattcaaaaacaaaatcggtgaccacaaggagctgcgtaaattctccgatgagatctgccgagaacacgagttgtctgtgctggaaaacagcgaattttacagcaagggcaaaaagaaagaatattggatccacaaggccggcaagaaaacccaccgggactatctgcgggaggatgtggaatactgcttgtcctttgcgaccagcccaagagagtttgaaagtcagctctttgcgctcgggtatacgctcgaccctgtgcgcttttcggtcaaggcaaagcattgggagcgtgccgtgcggctggataacatcggcttttccaaagatcgtgtcaacgcacagctgcggcagaatgctgaaaatcggtatcggctattttccttggaataccggccgccgtacaagccgaagaaattcccactggaggacgagctgcgaaagctgggtttctccattgagcacagttatgataccgccactgttttggtggatacggtgttttaccttgtcataacggcgatccaaatcgtagccgagcttgccgatgcaatgctgctgtcgccagatctgcgggcggctgaaaaggatttgaaggagctggttgccgactatcacttcttgcaggagcacggtatccatacggtagccgacctccaagcaaatattgagcgatccaagtcagagctttccactttggagcgtgagcgcagcggcttcagcaaccgcatacgacgcccaaaatcgcctgaagaacaaatacaaaacaaagagcgccgcaaagcggtatccaagcagatgaagcccgtaagggaacgccttcgccgtgcggagcggattttagagaaatccccgcacctgtatgaactgttaaaacaagagcacgagttggagaaaaaagcccgtgcaagatacaagcaaagaggtagataaaatgaagaatacgatgaaaaagccggtggcaattccggtagaaaaattgcgtccctttgccggacacccgtttaaggtcaaggacgatgacgagatgaacacgctgatcgaaagcatacagacgcaaggcgttctctcgccgctgatcgtccgcccgattgaaaatacagaggagtatgaggtcataagcggtcatcgccgattgcacgccgcacaaaaggcagggattaccgaggtccctgccttaatttatgcccttgaccgtgacaccgctgccattgcggtagtggacagcaatttgcatcgtgagcatattttgccctccgaaaaggcgtttgcgtacagaatgaagctggaagcaatgagcagacaaggacaccgctccgacctaacttccgaccaacttggtcggaagttagagaccgctgagattattgcacagcagtccgatgacagcaaatctcaggtacggcgctatatccgcctgacctatctcatcccagagttgcttgaaaagatggatcaaggcgaaatcgccttgtctgtcggtgtggagctttcgtttcttgacgagcaaaatcagcgagcggttttggagcaatgcgccatcaacgactgcaccccgtcctattcgcaggcttggcggatgcacaaggctgatcgggaagggacgctgaccacggcggtcattcaaaccattatgtcggaggaaaaagccaaccagaagacccgcctgaaaataccaatggagcgcatccgaaagtacttcccgcaaagctataccgctgcccagattgaggacgccgtggtgaagctctgcgagcgggactaccgccgacgaaccgaccgggagcgataaggaggtgcagcctatgggaaaatatcgcaagatcgactacacgcaggtcgcactgccggaggaactgcttacctcctttgccaaggccatgctcccggagctgcgtaagttttacgccagcgacgagggcaggacctattttgcaaagtggcttctgaagcacccggaatatgcggcacattcgacaccggagagcggatgactataataaaaattggagaggaggattctatatgaatgtggtcatttacgcccgcttttccagccacagccagacggagcagtccattgagggacagctcaaggtgtgctatgaatatgcggagtcgaatcattatactgttgtcggagaatatattgaccgggccatcagcggcaccacggacaaccgtgccgaatttcagcggatgatctccgacagcgacaggcacacctttgagggcgttttggtatatcagctggaccgttttgcccgcaaccgctatgacagtgctatcaacaaggcgaagctgaaaaagaacggtgtccgggtgctgtctgccaaggagaatattgcggacgacgcttccggcatcttggtggagggcgttctggaaagtatggcggaatactactccgtggagctttctcagaagatccatcggggcatggccatcaatgccgaaaagtgcctgtctaatggcagcaaccccggcctgggcttcaaggtcgatgccgagcggcggttctatgtggatgaggaggaagccgccattgtccgtgagatttatgagcgctacgccagcggcgagacgaaagcggagatcatccgggatctgaaacggcgcagggtcaagacctccctcggcaaggaatttagtcccaacagtctcagtcacctgctcagcaacaagcgttatatcggcgtctatctttacaaaggaaaggaaacacccggcgggatgcctcgcattctggatgatgacctattttaccgggtgcaatcgatgatgaacaaaaacaaaaatgcgccggctcgaactcacggcgagggcgaatacctgctgaccacaaagctgttctgcgggcactgcaaggaaatgatggtgggctacggcggcaccagcaagaccggcaggcaatatcactactatatgtgcaagaatgcccgcaggaaaaagtgtgccaagaagatcgtcagcaagtcctacattgaggaccgtgtggtcaacgagtgtttaaaaatgctgaccgaggagaaaatccgcttcattgccaagaaggtggctgaggagtgcgccaaaagcccggataatctgaccgccaaggcgctgaaaaaggcgatccgagaggcggatacggccattgaaaatctctggaaagccattgagcaggggcaggtcgtggaaatgctgacggaacggctcaacaagcgcatggcggaaaaggcggagctggaggcgcagctcgctattgaggaaaataagaagatcacgctgacggaggcacagattttggcctttctggactatgtctgcgagatgcccgccgacgatgtgaataagcgccgagccatcatcaatatctttgttcattccatctacctgtatgacgaccactttaccctcatcatcaacgccagcaagaagccgttgagcattgacaatatcccgctggatgatatagaaacggcatttgaaggcgaaaccggagcttcggaggggtgttcatccttgaacacccctgctccaccaaaagtccaccgtaattttaatagaattacggtggactttttctatgcccaaaaccgcttgaaatagggcttttcggttgtttcagcacataagtgaaccccgctgcagggcaattctgcggcggggttttgtgcgttttatgtggattgaggcttcatgtaccgtataatcgttaaacggctgaggtaatcgttaaatcacagaggcattcgttaaattacagggataatcgttgaattagaagggaattaaaaaatcaaaacacgcacaatctctgttcgcatagtttcatttttttggggggaaaaacagcataacaggttgtgttcgcatggatttttaacccgtgattgtcatgctgcacctccgttatacgcggaaaatcaccgattcatacgggcgcagattggggccgatgtagccgccctcgcggtcgtaggaggagagcagcacttcaccgttctgcggaacgagcgcggcggggattttcgacggttcggcggagaaattgtggaaagaaagcagagtttcgccgttatagctgcgctttagggcgaacagcgtatcggagccggtttccggaatttcgaggtcgccgcgtgagagcgcgggactgcttttgcgcagtgcgatgagcgctttgtagcagctgaaaatggagtgcgggtcgtttttctggttttccgcgttgatctttgtgtagttcgggttgatgccgagccacggcttgcctgttgtgaagccggcgttttcggttgcgttccactgcatcggcgtgcgggcgttgtcgcgggagatcatctgcgcctcttttaaagccacgtccggcgtgtcgcccgccaaaatgtgctggtggtaggtgttttttgcatcggggtcgttgtaatcttcaatgtgcgggaagcgcatgttcgtcatgccaatctcttcaccctgatacacgaacggcgtgccgggcagggagtgcagcagcatcgcgagcattttggcggaaacctcccagtattccttgtcgttgccatagagtgagacttggcggggcttatcgtggttgctgaaaaaccgcgcccaccagccgttttcctttaaggcgtcgtagtcgttttgaatatcctgcttcatttttttcgacgaccacgtgttgatctcgacgatcggcgcgacgaacgggatggccatatcgaactcctcgcggtcggtgttgacgtagcgggcgagctcctcggcgtctttcgacgccacttcgcccacggtcatgacgttatatggcgagaacacgcggcggttcatgtcgcggatataggcgtgcgtgccggggcgaccgttgatgagactcgaactgaacgaatagccgtccggctgcggcggctctgcggaatccgggaaatcctgcggcttatcaaggtagctgatggcgtccactctaaagccgtccacgccttttttcacccaccattccatcatggagaagatttcttcacgcagcgcggggtttgcccagttaaggtcgggctgctttttggagaacagatggtagtaatactgcccgcgctccggtacaaattcccacgcgctgccgccgaaaacggaggcccagttgttcggctccttgccgtttttcgggtcgcgccaaatgtagtagtcgctttttgggttatcgcgcgaggttttggattcgaggaaccacggatgctcgtcggaggaatggtttacgacgaggtccataatgaccttgataccgcgcttgtggcacgctgcacacagtgcgtcccaatcttccatggtgccgaactcgtccatgatctcccgatacccggagatgtcgtagccgttgtcgtcgttcggtgagcggaacacgggcgagagccacagcgcgttgatgccgagcgccgaaagatggtcaaggcggcttaaaatgccgggaatatcgccgatgccgtctccgttagaatcctgaaagctgcgcgggtagacctgatacacgatgagatcctttacccaatcttttttctgttccatataactttacctcctgcgcaatatcgatgtatattgcacaaagtggcctttcggccaagtattttttaccattataacacagtttacaagaatttgaaaagtatttgagaaaaatagtgaaaattgtgctttgaagtataaaggggaaagctgggcgcttagcttccaaacatgcgttaagttttctatactgcggtgctcgtttgccgggatgaatgcagagaagtcagtggtaaaaatgacgaaacggtttcagccgcagaaatgtacacttataagaatataagtgaatagaatagagacctacaaaacagggtataagtcacaggacaaatgatataggatgttgtagggcagtatagacaactcggtttagaataaacagaaaaaacgaatattgtatcgataaagttaaagtgaatagcggattacaccggaatatttgcaatcggaaccattaaaaaactcatgaaaccgcaatttatacactttggaatggaaaagtgcgcaaaacatatagatgtatgaaaattacgcatttatataatagaaaactatttccaagatgttcgttaaatgtcatttttttgttgtatatggaatcaaaaaaatcaaaataaacaaaagcatttggagaaaataccgaaaagtttttgaaaacttattgacaaatcgtgaacgcagtgctattctatgtacagaaaaaccgagaacgaaattaaaatttggttatttttcacttggttctacagtttaaagctatttattagcgttggtcttcggctatggagcaatagaccgatgctatcgcagcgtttgaatgttctaaataccgccgctttcagcggaatgcacacatcgtcgtaccggatgctaaaaaggcgagcgtgtggggaaaggtacatcagtgaacggacaagcgctgtaagataaatagggggtcatgaattttgcaaagcaaagttcatggcgggattcctacaaattttgcgatttgcaggaattcaaaacaccggggatcacaaagtggggtatgctttgtgacctcaacacattatgaaccgcaggttcacaaaacaagagaggtattgtattatgaagaaaaagaccttagctgttcttctgtcggcggccatgctcgtcaccggcatcctgagcggctgcggtggcggcggcagcacaagcagtgcagcatcctccggctccaccgacagcaccagcagcgccgcgggtgagtcttctgcttccgaatctaccggctccggcacgaatgccgccgcaggtcaggttacggcggttggcacgaaccgtgacgaaactctgatcgttgagacttcgtctccgaccgacactccgggccagttcaacagctacatgtccggtacgaacatgggcttcggtattcatcagctgatgagcgcacacctttgggaaatggacaccgtttccggtgagcagttccctgaaattgcagccgatatgggcaccccgaacgaagactttacggaatggaccgttaagatccgcgaaggcatcaagtggtccgacggtgaagacctgaacgctgacgacgttgtcttcacgttcaacatgatcaaagaaaacgacaagatcggtgcttccgcagcgaccaacctctacatcgataaggttgagaaggttgacgattacaccgttaagttcacgatgaaggaatccttcccgcgctttacacagcgttacggcatcaccgtatggggcaccgattaccgcatcgttcctgagcacatttactcccagcaggctgatgttacgacctttaaggacgagcagccggttgtagcaggcccgtacaccgtagaagactatgactccaacggcgactggatcctctacaagctccgtgacgactggaaagaaagtacgcttggcgttgtaggcacagagcactacaactacagcgaagatcaggttccggcagaatatgtttggttccgttatcttggcgactcctcctccagacagatgcagatggtcagcaacgaagttgatgtcctctgcgaagttacgatggaagagctgcaggcaatgcagagctctaacgacaagatcaacgcatggtacaacgagttcccgtatgcaaccatggacgacccgggcgcaaagggcctggtgttctctcagggtcagggcgctccgtacgacaaccctgacttccgctgggctatcgttctggcactggatatcgaccagatctccatgaacatcttctccggcgcaggccgtgcggctccgattccgctgctcaacaacacccagtatctccaggatacatacaccatcccgatgcaggaatggcttgagaactttgagcttgaccttggcgatggcaccaccattaagccgtacgacaccggctatgcaaagcgcatggctgagaagaccggcgtaaccggcaccgacgaagagctcatcgatatgttcggcgcaggctggtggaagcacgatccggaagcagctgaaaagctcctcatcaaagccggctttgagaagaaggacgacggctggtacttcaatggttccaagttcacaactgaaatcagctaccttgctgatacagaagctcagtccgctcgcggcgctcaggctgcttacaaccagctgcaggcgttcggcctcgattgcaccattacttccaagagtactgctacttgggacgttgacggtggtcagggcaactaccagatcggcacttactggccgtccgctggtattctgaaggacttctactccgctatcagcggttgggacagccgtctgatgaagccgctcggcgagaccggttccggtcagggcgcacgttggaagaatgagaaggttgacgagatccttaccgaactcgcaggcgttgatccgaccagcgacaaatcctatgagctgcatcaggaattcctgaaggaagctgttaaggaaatgccggcaatcaacttcctcagcggtacaaagttcgttccgaccaacagcacatattgggaaggctacccgaacgccgagaacgcatatgacggtccgtggtggtggtggagccgcttcaagtatgacctgccgttcattcagccggttcagggctaatttgatagcttgaatacttggagagaatccaatagcactaatctgaaatgatctgaagaggatgagggcgtgtgccgaatacccatgaccacgtccgtcatcctctttctcatttcccagaatatcctgttgtaatttgtctataagataaggaagtgtggctgtgaaattcaaaacattctttttacagcgtatccttgcgtgggcgttgacgatcttgatcggcgttacgttcatcttcttcatcccgcgtatgttcccttccgatcctgttgagaacatgatcgcccagatgcaatcccgttccggcaacatggatccggcagaaatggaagcgctacgtcaacaacttagaattcaattcggtctcgatggcactcttcttgagcagtatggctacttcctgctgcatggccttttacagtttgactttggcccgtctttgatgagctatccggagccggttacctctattatcggtcgtaacctgccgtacaccctcggtttgtccctgaccaccacgctgcttgcatggatcgtcggcaacttcatcggtttgcttgcaggtttccgcaagaacaagacatcctctaaaatcctcgaaggcatcgcaatctgcatttacccgatcccgtacttcctggtcgctcttgttctgcagattgtcttcgcgttcgtcctcggctggttcccaatccagacaacgctgcttacccgcggcacgttcgcacagtggctcggttcgcttctgaaagcgtctgttctgccgggcatctccatgcttctgctcggcacaggctggtggattatctctatgaagtcccttgccggcacgactgcagaagaagacttcgttttatatgcacgttaccgcggtatttccgaagcgaagatcggtgcgagctacgttttccgtaactccatcctgacccagattacggctttggccatgagccttggcggcgtcttcggcggttccatcatgacagaaatcatcttcggttacccgggtgtcggtacgctgatccagaatgcgattttgcagtccgattacaacatgatcctcggatgtatcacgatttccatcgtggcgatttccacggcgacgttggttgttgaccttatatatccgttcatcgacccgagaattcgttacggttgataaggagggaagttgtaatgaaaaaatttgcaaaattttggaaagcagccaacttccgcctgaagttcggtcttatcgtgaccctgatattctttatcatcggtttcgttgtttactatgtaccgcacgtgaacccgttcacgttcaatacctacccgaataagctgggtgcttccgcagaacactggctgggcactaccagtatgggtcaggatgttgtgtggctgctgattgaagctatccacaactcgctcgtcatcggtctcatcgtggcattcctcggcacggttgtcggtgtttttgtcggtctgctttccggttttgccggtggccttttagaccgcgtgctgatgattgttacggatacgttcgttgttattccgtctctgccgatccttatcatgatgacctccctgatgaagggcagctccaccacgatcgtgatggctcttgtgcttgccatgttcgcatgggcttggccgagccgccagatccgttccatggcgctgagcattaaagagcgcgactttatccacacggcgaagttctccggtgaaagcacggtgcagatcgttgtgaccgagattctgccgtatgcgctgacctggtcgctctccaactttatgaacgctacgctttccgctatcggttccgagtcgagtcttgctgttctgggtctttcccccggcaaccttgtttctctcggtaacatgattcagtgggcaagaagctacaacgcaattttcaacaagcagtatctctggatcggcgcaccgatcgttgcaacggttattctgtttgtcggcctgttcttactcattacgggctataacgattacttatccatgaagagaggcaggtaacgaatatgttaaaagtcgaaaatctgtccacttcttacaagctcatcgacggtgacgttcacgtccttaacgacctgaactttgagatccacgataacgagatattcggcatcgccggtgaatccggctgcggcaagaccacactgctgaagaccctctacgatattatcgagttcccgctggagatcgacaaaggtaaagttatcctcagcggcgaaaagaatggacaatccttttcttatgaatccggaaacattcagaagacctggtggaacaacatttcttacgttccgcaggccgcgcagagcgttctgaacccgatcgttcgcctgaaaaagcagtttttggattctatcccgcaggaagaccgcaagaacgaaacgaaagagcagaccctcgcacgtgttgcaaaatacctcgaggagctgaatctttccccggatattttggaatcttatccgttccagctttccggcggtatgcgccagcgtgttatcatcgcgcttgcgacctttatgtccccgaatgtcgtgcttgccgacgaaccgaccaccgctctggacgttgttgtgcagaagggtattttgaagatgctgatgcgcttgcagaagcaactcaagaacaccatggtcatcgtcagccacgatatgggcgtgcattatcagattacggaccgcatggcgatcatgtattccggcagcatcatcgagcttggcccgaccgatgcaatctttaatgatccgatccatccgtacacgaagatgctggttgactccctgccgcgcgttggcgataagagccagaaggtcggtattccgggtcgtccgccggcactgaagaacccgcctccgggatgccgtttcgcagcacgctgcccgcatgctacggatcgttgccgtcaagagattccggagttcattgaagttaagccgggccgctttgcagcctgccatttgctgaagaaggagggagagaagaatggctgataaattgcttgaaatcaagggcgtcagcaaaatcttccgcgtaggcggtatgattcgtggcaaaaagcttgttgcggttgacgacgttacgctttccatcgacaacgataagccggtcatcctctccgtcgttggcgaatccggttgcggcaagtccacactgtgcaagatggttctgcgtctgcacaacccggatatgggcgacatcgtgctggacggccaatcttaccgcgataagaaaagctacgacgcaaagcagttcaagctggaagtgcagccgattttccagaacccgtatgagtctttctccgcacgtaagccggtagactcttacctgttcaacacggcgctgcgccttggcattgcgaaaaacaaagcagaagctacaaaccttgtagatgacgccctgaagagcgtcggcctctctctggcggtcgtaaagggcaaataccccacccagttctccggcggcgagctgcagcgtgtttccattgcacgtgcgcttatcacccgtccgaagttgatcattgccgacgaaccggttgcggctatcgatgcttccatgaaaatgaacatcgtcaacctgttcaaggagctgaaggataagtacaaggtctcctttatctacatcacccatgacctttccacggcgtactatgtatccgattacattgcaacgctgtaccgcggctgcctcattgagtacggcccggccaaggagatcatggacgagcctgcacacccgtacactgagcttttgatgagcgctgtgccgcgtatcggcgacaagtgggcggatgacgacatggcgttgccggatatggagtctaaggaatattccattacctactgcaagttcgcaccgcgctgcccctatgcgacggacgaatgcagaaaatcgcgcccgggcgaaacctatctgaacgatgtcagaaaggtcatgtgcttccacccgctgattcagccgaagaagtaaagcctctgcgcacaacaaaataaacaagctacacttgccgaccccctgaaggcccatgaagccgacatttcctccgtcattgctttatgggtatcagggggttaatttttgctttgtgggcgtgctttaaaacggttgaaaacatgtcgggattgttataaaaagcagggaaattcggcggaataaggattgaagtttgtcgcgaaatacggtatactgattcacaagcggcactgcggggttcgcgggccgaattttagagttttggggagaaaatacaatgaaaacgaagacgcgatttgcgtggaaacaatttctgaaaaatcttgcgatcatcgcgatcccggtggctttgcagaacatgctgacgacaaccggcagcatgatcgacaccatgatgatcgcgccgctgggcgaaacgaccgtgggcgcggtgggcctttgcgcacagttttcctcgctgatgtttgcgggctactggggctttttcggcggcggcatgctgtttttctcgcagtattggggcgcgcaggatgacgacggcatcgaccattcctacggcctgacgctgacctgcatgatgatcgtcgggcttacattcggcgtctttgcgatttttgcgccggaaactgtgatgaagctctatacggataaggagagcattcaggtgattggcgcggaatatctgcgcatcatcggcttcggttaccccgtgcaggtgttttccatggcgatgagcgctctgctgcgttctacggagcgcgtgcgcatcccgctgtttgcgtcaatcgcctcggtggcatcgaatatttttcttaactgggtgttcatttacggaaagttcggcttaccggagatgggcgtgcgcggcgcggcgctggcaacatccttggcggcggttatcaacgttttggtcattttgattttggcgcgtgcgcagaagtacccgtatctgttccactttaaaaagcatttccgctggaataagaagcaggtgaaaatctacttcgtcaagtgcttccccatcatctgcaacgaagtgctcatcggcgtgggcaacatggttatcaacgttgttttgggcagacagtccgaacaggccattgcggccatcgcggtgttccgcacgctggagggcatggtcatcagcttctttgccggtttctcaaatgcggcttccgttttggtcggcacatgcgtgggctccggcgagttggacgcagcctacgagcgcgcaaaacgccttgtgttcctgtgcggcagcacgattttgtgcgtatgtctggtgctgctcggtatccacaagccgctgctttccgcgatgagtctttccggcgaatcgatggagatcggttcgcacatgctgatgatttactgcgtggcagcggttattcgcatgtgcaactgggtgcagaacgatacgtatagagccgcgggcgacgcggcgttcggcacaatccgcgaaattgcatttatgtacgcgatggtgctgccgctggtgtgcctgacaggccttgtgtggaaagcgccgttccttatcgtgtttgcgtgctgttatatcgacgagccgatccgtctcattttgatgcagcggcacatgtactccggcaaatgggtgcgccccgttacgccgcagggcatggaagcgttgccggcgtttatggaaaagcatggacgtcataagaaggcggcgtaaacaacttaaagacagaaaaaaggacttccgaaaagaagtccttttttcgtgtgtatgaaatttagtggatgttctctttgatccaccttgcgtcgtcggcgatgcacttgtcgtgctcgtcgtagaagccttcgcgctctacgacccagaacgcttcaaagtcctgctcgtcgagtgcgtctttgatgtcctgccagttcatgttggactccggcgcgcccatggggcactgtacctcaaactgcttcttgccctcggggctgttcatgtgcgcgttgaagccgtccaaaatcttctggcgctcttcaagcggcatttccttgacgttggcaaacggattggcgtggcctgcctcttctgccgcatggcgggaagccggtctcgggccggggccctgcaccttgctgttttcctttacatggatggcgacaaagcggtttttatagcggcggatgaacgaaggcgggtagcagccgccgttctgtgcccagccgcagtcgagctgcgagtagcactttgtactgttgtcaagcaggtgctcaagcaacgttttgccctcatccatgaagaattcctggctgtggttgtggtagccgatcttgatgccgtacggctctgccatttctgccatttcgtcgagcttgtgcgcgacttcgacggcttctgccttattgcagaacggcgtgcctgcccagatgacggccttgccgccgagctcggcaatctttttgacgatctcttctgtcggctctgcgtggatggagacaacctcaaggccggtctctttcagccattttttgatgtcctcaatgtcgttatcgaggtcgaccggcagcagctcgacgcccgtaaagccgagggacgcgatggtcttgaatttatcgagcagcgtgggcccgaggccgagatagctcgcgatgccgccgaaagaatatgtaccgatattgactttcatgtaaacttccccaatcgtaacaaatttgtgaaaaataaattcatatatcaagtaaaattataccatatacacaaataagcgtcaatcaaaattatggggagcgatggaaaatttgcaggctattttatggcgaaattgtcggggacaacgcaatttttcggaaatttcggcgtgtcggcggtttcataccacgctttgtagaccgggatgagctctgttaaggtgattttttccgggcggtcgaggaaaccaagtaaatttgccatgcggccgaggagttcttcgggcgtgaaacgcgtgcgcagaacgccgatgtcgaggtcgcgctcgcgcttacttaaacggcggccgtcgcgattgacgagcagcggaatgtgtccgtagtgcggcggtgtgtggccgagtgcgtgaaagagctgaatttggcagccggtggaagggagcaagtcacgcccgcggacgacttccgtcacgcccattaaagcatcgtctacggtgacggcgagctggtacgcgtgcacgccgtcgctgcggcgcacaatgaaatcgccgaacgtggactgaacatttatattttgcgggccgcagtatagatcttcaaatgtaacggattcatccggtgcgcgaaaacgcaagcttgggcggcgcgtgcggcttttttcttcggcttcggcgggcgtcaaatttcggcataaaccggggtagcggaacgtgccatcgcccgcatgaggcgcggagaccgcgtgcagctccgcacgggtgcaaaagcatgggtaaacatcgtttttggcgcggagttcacttaacgctgattcgtatagctcgcggcgcgcgctttggtagtagggggcgtgggtgcgctcgtggccggggccttcgtcccaagtgaggccgagccatgttagatcgtccattaaaagctcggctttttcgcgtgtgcagcggtcggggtcgaggtcttcgatgcgcaggagcatctcgccgttttggctgcgcacggaaagccacgcaagaagcgcgcagcagaggttgccaaggtgcatgcgccccgaggggctgggcgcgaaccgcccgcggacaggggtaggttgtgaggtggacatactaaaaatcctttcggagaaaatttaaaattataaaatcattttaccgcagattttgggcgcgcgcaacggttttgggacggagaagtgaattgacaggtgtgcaccaaacgggtaaaatgatatagcaaagttttgcacagcccgcggcaacggcggttaaaagtttcgcccgccttttcaaaggcggcggaatccaagggcagcgcccttggtcgagctctgcagagctcgaaactctttagactttagaataagaggacatcaaaatgaacgaaaaagaaatctcggaaattcgccgccgattcagggcggataaaagcaatatcacccatgtgcgcgggtgctacgtcaacgaaaagcaggaaatcgtctcgcaattcgaccagccgctctccctgctgccgcaggaggaatgcgaaaatatgctttccgtgctgcgccgtacgctttccggcacgctcggcaaaaatctcatcgaaataccgtttacgactgcgcaggtcattgacagcgatgagcaccggctgctgatggcgctgcgcgactcaaagcttaccgatgaagaagccgtacagatgttttttgagaaggtcatcgcatcatacagacccgagggtacgtatctcattttgctcgcgaacgatacatacgatgtgccgtaccgcgcaaaggacggcgaaacgctggaggacgcctcggagaatatctataattacgttctgtgtaccgtctgccccgtgaagcagacaaagcccgttttggggtacgacgtgccggaaaatacgttccacaaccgcgacattgattggcttgtttccgcgccgcagctgggctttttgttcccatcgttcaccgaccgcagcgccgatatttacagcgccatgtactactgccgcagcgcttcggaaagctacgatgaatttatagacgcggtgttcaaccgcgaagcgcccatgcccgcagaggagcagaaaacgacgtttggcacgattttgggcgatgccttaaatgacgcgtgcagtttagacgtcgtacagaccgtgcacagccgcctttgcgggatgattgaggagcacaaggcgagcaaggatccggagccgctgaccattacgggacgcacgatgaaaacgatgctgaccgcttgcggcgtgccgggcgagaaagccgaaaagtttgaggaagcctgcgcggagcagttcggcgcggacgcggcactcagcccgcgcaaccttgtggagacgaagaaattcgagatcgaaacgccggaggtgcaaattcgcgtcgaccccgagtacagcgagtggatcgagacgcgctacattgacggtgcaccgtatatcctcattcccgccggcgcgggcgtgcaggtgaacggcgtgccgatcgccatcactcgcccggacgtggagtatgaggagaaagaatgatcgaattcaaagaactgaatatggaggttttaaaatcggttttgaacgcatccgtatgaggtggtttttcgtgcccgtgcgcgatgacgagggtaaggtcatcggctacttcgagcgccacgaaatgcactgggatttcagcgaccccggtaagcctgttgcggtgccgaagctgaagcaggatattaagacaaaacaagcggcgcacagggtgtgaaagttctgtgcgccgctgattttatgtgcttttaaatttactcgaaatcagcgttcatgaagagctcgagcattttgaccgtcgcttcgatgtccttttggctcacgatggcgttcgggccgtgggtgtagcgggtgacgaccgagaagccaatcgttttgataccgccgccgacgagcgtcatggcgcctgcgtccgtgccgccgacatagatgacgtctttctggtacggaatgttgtgttctttgcacagcgcgatggatttattcacaaggccttcgtcgctgatggaaccggtgtcggagattttgatggcgacgccgtggtcgagcgcgttgctgccctccaaatcgcccgggcggtcgtgacacggggtgacgtccaccgcgacgccgatgtccggctgaatacgctgcgccgtgacctgcccgccgcgcgtgccgacctcctcctgcacggtgaacgcgaggtagatgtcgttcttcggctttttcacgttcatcatcgccgccagcagcatatagcagccgacgcggtcgtcgatggcctttgcggtgatgtagcccggcgcaagctccgtgtacgggccctcatagcatgcaacgtcgccgacatcaacgtattttaaaacttcttccttgctgtgcagaccgatgtcgatgtagcaatcggtatagcgcttatagccgccggcgctcagcttttccggcgggatgcggcttgcgaccacgccaaccacgccgttgcggaagcgaacgcggctctggtacgttgtaaacgtccagcagcagccgagctccttaaacataatgcggccgtcttcctcaattttaatgacctgaaagccgatctcatcggtgtgggcggcaagctctatgcgctttttgtgctcgcccgtgcccttaaaataggcgatgacgctgccgtttgggtcggtggtaatgtcgtcagcaagcggtgctaacttttctttaatatagtctgcaacggcggtctcgtagccgctgacgccgtgcagctgagtgagttcttcaaataacttcatacgggttttcctcctctaaacggggcagaaagccgtagtccggcgttattctgccatgacggacgcaatgtctttgcagagtgcgtccacgttttcgtccgtcgtcgcccagcttgtacaaaggcggacggcgctgtgtgtttcgtccacgcgcgcccaataggagtacttgtacttttccgcgagcttttcgagcgcagtatccgggaaaatagggaactgctggttcgtcggcgagggggcaaagaacgcgcagcccgcgtcttcgcacgcttttgcaatgcgctttgcctgccgcacggctttttcgctgatcttgaaataaagatcgtccgtgaaaagttcgtcaaactgaataccgagcagacggcccttagccagcatgccgccgcgctgcttgatgtggtagcggaaatccgttttgagcgccgggttcgtgattacgaccgcttcgccgaacaaagcaccgaccttcgtgccaccgatgtagaagacatcggaaagcgcgcagagatccgcgagcgtcacgtcattttcgggagccgtcaggccgtagccgagacgtgcgccgtcaataaagaggtacagcccgcagcgcgtgcagacatcgtgcagggcggtcagctctgctttggaatataacccgccgttttccgtgggcagggagatgtaaacgagcttcggctgcaccatgtgctcaaacgaggcatcgttcacgtgcgccagataggcgttttccacctgttctgcggtgatcttgccgtccggggtggagggcagaggcagcactttgtgacccgtcgcttccaccgcgccggtctcgtgcacgttgatgtgtccggtgtccgcactcagcgcaccctggtgcgggcgaagaatcgctgcaataacggtggcgttcgtctgcgtgccgccgacgagaaaatgcacgtccacgtcctcgcgaccgcatgctttgcggatcttcgcgcgcgccaaatcgcaaatttcgtcctcgccgtagccgacagtctgcatcatattcgtttcacaaaggcgctttaaaatgttcgggtggcagccttcggtgtaatcacagttaaagtaaatcaaaatttcgcttccttccgtatcccgccgcacagagaaaatctccgccgaacggaactgaatgcaagcacagacgagtgagcttgcaaaaatacacccgtttgcgctatacgaataaatataccatgcaaaactgggtttgtaaagcatacgttatgcaaaaatcagggcctttttgctttctgagggtacggctccggcacgtttgtcagctctaagatgtaatcggtggaaacggtgtagtaccgcgacagacgaatgagcaggtcgatgggcagctgccgcacgccgttttcgtactgcgaatacgtgttttgcttgatggagagaaaatccgccacctgcttttgcgttaagtcgcgatcctcccgcaggtctcgaagacgcataaaatacctccaaaatttcgttaatttaacttaattttagagttctcattttgagatattgacatttatctcaaaatgagatattatcatagtaaattaaaatctgccgcaataaaaaacttggcagatatgaggaggaagagaaatggcatacgagtacaaggaatatgagtatgtggaaaactgtttgatgaaagccggagaagttttgaaagaagtgcaggtcgtgttagcgataattacgggaatatgcggaattattatcgcggtcggcgaaaaggatatttacggcgagttcagttttcttctgtttttgactgcgcttattccctatgtagtggcaaccgccattcttatcgggcttgggtggttaggcgacatttttttcactgcttttgcggatattcatttttatttgagatcacttaacaaggttgctcacggttctactaatggtgagaagaacggaataaacactatgccatctatatccgatcaaaataatgatacttggaaatgtcgtaactgcggtcgtattttaaagacatatcaaacgacttgtacttgcggtcaaaaaaaatccgaaaattaaaacgcaatataaaaagaaggcagagaaaataccactctgccttctttttatattgcggcgcaaagtgccgaaaacgggtgcatttttacggcgaaaatgcttgacaaagcggggcggctattgtataatacaaaggctgtaaagaaaaaaactttacagcagggcgtttgaaattggaaacgcccggaaacggagcgaactatggcaaaggatctgcgcatcacgttcctgctggatttttacggcgacatgctcaccgaaaagcagcgcgaggtcgtggaatgctattataacgaagacctttctttagcggagattgcagaggagaagggcatcacgcggcagggcgtgcgcgacggcatcaagcgcgccgaacagcagcttcttgaaatggaagaacggctgggtcttgcaaagcgcttccgcagcgtgcaggaagaactgacgcagatctgcgaccacgcgttacagatcgaagcggaaaacgaaaagaacggcggcgatccggtcattcggcagaacgtggagagcattttgtgctccgcaaagaagctgacggactgagcggcgcggctctgaaaggatttttacatggcgtttgaaggtcttgccgataagctcggcaacgcgtttaaaaagttaaaaagcaaaggcaagctgacggaaagcgacgttaaggaggccatgcgcgaggtgcgtttggcgcttctcgaagccgacgtcaactacaaggtcgcaaaggactttaccgcgcgcattacggaacgcgccgtgggcgaggacgttatggaaagcctcacccccgcgcagatggtcatcaagatcgtcaacgaagagctgacggctttgatgggcggcagcgaagagcgcctgaaaatgcccgcgcacccgccggctgtcatcatgatgtgcggcttgcagggtgccggtaaaacgacgcacagcgcaaagcttgcgaaaatgctgaaaagccgcggcagccgtccgttgctcgttgcaggcgatatttaccgcccggcggcaatcaagcagttacaggtcgtgggcgcacaggccggcgtacccgtctttgagatgggcaccgaagacccggtgaagatcgcgcaggcggctgttcgccacgcgcgcgactacggcaacgattacgtcatcatcgataccgcaggccgtctgcagatcgatgaagcgctcatgaatgagctgaaaaatataaaagaagcggtgaaccccacggacattctgctcgtggtggacgccatgaccggccaggaggccgtgaacgtcgcaaagtcgtttgatgatctgctcgacatcacgggcgtgattttaacaaagctcgacggcgatacccgcggcggtgcggcgctttccgttaaggccatcaccggcaagcccatcaagttcgccggcacgggcgaaaagattgacgacctcgaggttttccaccccgaccgtatggcgagccgtatcctcggcatgggcgacgtgctgtccctcatcgaagacgcacaggcgaaaatggatgaaaagtccgcggcgcgcaccgcagagcgcatgatgcagaacaagatggacttcaacgacctcttggagcagttccggcaggtgaagaagatgggcccgttaaagggcatcctctcgaaattgcccggcatcaacagctcgaagcttgatgaaatggacattgacgaccgcattatggaccgcaatgcggcgatcatcctttccatgacccccgaagaacgcgcaaagccggagcttttgcaggcttcccgcaagcgccgcatcgcggcaggctgcggcatgaaggtggaagacgtcaaccgtctttgcaaccagctcaagcagatgcagaagctgatgaagcagttcggcggcaaaaagggcaagaaaatgatggcgcgtatgggcggcatgggcggtttcggcggcccggatatgggtggcatgggcggcttcccaatgtaaatgcgataaagaaacgaacttcatttgtttctgacgcaagacgtatatttgaattgtaaatattgccgacgaatcgttggttaatagataaaacttattttttataatatggaggaaattaccatggttaagatcagacttcgcagaatgggtgctaagaaggctcctttctaccgcatcgttgttgcagattcccgttacccgagagacggccgtttcattgaggaaatcggctactacaacccgatggaagagccgagcgttgtaaaggttgatccggaaaaggcaaaggcttggatggaaaagggcgcacagccgaccgataccgttaaggcactgttcaagaagcacggtgttatctgattgcccgtcttctcgtttgagaaaggaacaatcttatgcaggaattactgaaaatcatcgcgcagggtcttgttgaaaagccggaagaggtttccgttacactcgatgagcccaaggaagacggttccgtcgtctatcatcttcacgttgcggaagaggacatgggcagagtaatcggcaagcagggccgcattgcgaaagcgattcgcgttgttatgcgtgccgcagcaacacgcagcagcgaaaaggtcgttgttgagatcgattgatcgaaagagggacgcacgggcttcgtgcgtcctttttatattaaaagagaggaaggctttcgctgcggcagagccgaggaaaacacatgaaaaaacaatttctggaagcgggaaggatcgtgggtacgcacggcgtacgcggcgaaatgcgcgtggaaccgtggtgcgattccgccgattttctgaaaaaagtgaagaccctgtattttgacggcggcaaaacggatgccgggctcctatcttcccgcgtacacaaaagccttttgctggtgcgcttaaagggcgtggaaagcgccacacaggccgacctgtacaggggcaaaattctatatcttgaccgaaacgacgtgcgcctgccgaaaaaccgctacttcgtggaagatctcatcggccttcatgtcatcgatgacgcaacgggcgcggaatacggcacggtgcaggacgttttcgagaccggtgcgaacaacgtgtaccgcattgtaaacggcgcgggcgaggaatttctgttccccgccgtggacgccatgatcgcgaagacggacattgaaagcggaaagctgtttgtaaagcccattccgggtattttcggcgacggcgcggagaccgtgcccgtaaacgtcggggaggcagcggatgcggattgatattgtgacacttttccccgaaatgtgcgagaatattttgaacgagagcatcatcggccgtgcgcgcgcacgcgggtatttgcaggtgtgctgtcaccagctgcgcgaccatggtgagggcgtgcataagcgcgtggacgattgcacgttcggcggcggaaagggcatgcttttgatggcgcagcccatagcgaaggcgtttgacgagatcatcgaacaaaccgccgtgcgcccgcatattgtgtatatgtccccccgcggacgggtcttagaccaggaaaaagtgaaggagctcgccaaaaacgagaatatcatcgtgctttgcgggcattatgagggtgtggatgagcgcgttttggaggaatacgacgtggaggaaatctccatcggcgattttgtcctgacgggcggcgagctgcccgccgtaatcctcaccgatgccgtggcgcgcatgctgcccggcgtgctttccgaagacgtgtgctttgaggaagaaagccattatgacgggcttttggaatatccgcagtatacccgtccctctgcttggcgcggcagagaggtgccgcaggtgcttttaaacggccaccacgaaaatatcaaaaaatggcggcgcgaacaatctttgaaggtcacgcagaaagcccgcccggacctctttgaaaaagctgaactgactgcggaagaaaagcgcgctttcggcagaaaataagcggattttaggaatgtttaaccctctgtggcgaactgattttacgaaatgttttcaacaagcagagcaaaatgcacaaacacggatcgtttcatagcgatatgccacgggcatatatccaaaaatgggataccccgcttgacggggggacaaattatgctataataacttatattgaagcattttgagctttagaatcatgtttgacattcagagtatgtaatgtattacttacaggagagtgaatcgcaatgtgtgttaagaaggacgttttggttcagaatcaggttggtctccatgcaagaccggcaactttcttcatccagaaggcaaacgagtttaagtcttccatctgggttgagaaggatgagcgccgcgtaaacgcaaagagcctgctgggcgttctgtctctgggcatcgtcggcggtacgtcgatcgacatcatcgctgatggttccgacgagcaggaagctgttgacagcctcgtggctcttgttgaatccggctttgccgaataatttcagcttgtcaaaacggcgcctatcggagcatttccggtaggcgtttcttctttctcagtcgcttagtgactgagccgcatggaggtgcgcatggtacagcttacggaagaaaaaatggcgcatatcaaagagctgcgcaaaaaggcgatgaagctgccgcttcacccgggcgtgtacatcatgcacagccgcgatgataccatcatctacatcggcaaggcgaaagcgcttaaaaaccgtgtcagccagtatttcggctcggataaaaaccataatgaaaaggtgcgccgcatggtctcgaatgtcgagtatttcgagtatattctgacggacagcgagtttgaagcgctcattttggaaagcagtttaatcaagcagcaccagccgaagtacaacattctcttaaaggacgataaggggtacagttatattaaggtgacagcgggcgactggccgcgcatttcggagacgaagcaggtcctgaatgacggcgcaaagtatatcggcccatacctttctgcgtggacaatcaaggacaccgtggaggaggcgcggaagattttccgtctgccgtcttgcacgcgcaaattcccgcaggagatcggcaggggccgtccgtgcctcaactactacatcaagcagtgctgtgccccatgccgcgggcacgtgagccaaaaggaatacaacgaggccgtgcaggaggcgcttgatttcatccgcggcggcacaagcgattccgtgcgcacgctgacggagaaaatgaacgaggcggctgaaaatctcgattttgagcttgccgcgcgcatccgtgaccgcattacggccatcaacaagctgaaagagcgccaaaaggttgtcgcaagccgcgtgccggaacaggacgtcatcgcgctcgtgctcggcggcgaaaaggtgagcattcaggtgttccgctttgcgggcggcagactgtatgaccgcgaatcgtttttattaaacgccgacgacgagccggagcagatccgcagcgaatttgtcatgcaatattattcgatgcgcgataagatcccgcccgtcatcacgatagacggccccgtcaacgacgacggcgtccttgaagaatggctgacgaaaaaggcggagcgccgcgtgaagttccacattccgcaaaagggcgaacagaagcagcttgtggaaatgtgccgcacgaacgccgcggaagcgcttgcgcaggctatgggccgcgccacgggccgtgagacctccgcgctcgatgaactgcgccagctcttaaacctgcccaaaacgccggaatatattgaatcctacgatatttcaaaccttgcgggcggcgagaacgttgcgggtatgatcgtgtttgaaaacggccgcccgctgaaaagcgcgtatcgcaagtttaaaatcaagactgtcgacggacaggacgactacggcagcatgcgcgaggtcatccgccgccgttttgaagaataccgcgccgccgataagcccgagggcttcggcagactgcccgacctcattctgctcgacggcggcaaaggacacgtgggcgccatacgtccgcttctgcgcgaaatgggcatcgacgtgccggtatacggcatggtaaaggacgataagcaccgcacgcgcgccatcacggaggacggcggcgaaatcgccattcagtctacgcgcgcggtgttcacgctggtatcgagcattcaggacgaggtgcaccgctttgccatcggctaccaccgccagcagcgcaaaaaggcgaccatctccaccacgctcacgtccattccgggcatcggcgaaacgcgcgccaaagcgctgatgaagcactttacaaccatacgcgccgtcagcgaggcgacggaggaaatgctggaggaaacgcccggcatgaacgcccctgccgcccgcgccgtctaccgttatttccacagcgaagaaaacgatggggaataacgttgttcctgcgtatttttcgacgtttctctgcaaaaactgcgcaaaaacggttgacatatttctattcaaatgagataataacttgaagtgtgtccgtacatgttttttagatttcggatacggacttccaaaagagaaaggagtgttcggctgtgcgtatcataaccggttcccgccgaggcagaaaattgaaaacgctcccgggcgatgctgtgcgtcccacgccggaccgcgtaaaagaggcgcttttcaacattttgcagtttgacctggagggccgcgtgtttctcgatctgtttgcgggctccggccagatcggtctcgaggcgctcagccgcggcgcaaagcgcgctgtgttcgtagacagcgccaaggcatcctgcggcgtcgtgctggagaacattcacaccacagggtttgaaaacgaagcgcaggtgatgaacgcggagtatgcatcgtatctgctgcgctgcaccgagaccttcgacatcgcgtttctcgacccgccgtaccgcacgggcacgctcacaaaggcgctccttgcggtcacgccgcacatgaaccgcggcggtatcgtgatctgcgagcaccccacggacgaagagctgccggagacggcgggggaattcgtgcgcgtgcgcgactaccgttacggaaaaatcttgctgaccgcgtatcgccatcaaagcatggtgtaagcgcaaaaagggcggtatatcaatgaaaatagggatctgtccgggcagctttgacccggtcacgctgggacacatggacatcatctcccgtgcgtgcaaaattttcgacaaagtcatcgttgcggtgccggtaaacccggataagcgcgcgagctttacggtggaggagcgcatggaaatgctgcgcaccgtcacggccgatatggaaaatgtagtggtagactgcgtgcgcggtcttttggcagattatgcaagcgaaaagcatgcggctgccattgtgaagggtctgcgcgcaatctccgactttgaatatgaatttcagatggcgctcaccaataaaaagctgaacccggagtttgaaacgctgttcctgccgaccagcatcgagcacatgttcctcagctccagcatggtcaagcagattgcgggcttcggcggcgatatttcccattttgtgcccgagtgccttttagagaaaataaatcagagactttgccgcacggcagactgaatgcggctaaaaatacgaaaggaatggattttttatgagcaacacgcaggcaaccgtagaagatttgatcgatgaattgaccgacgtactggagaaaggctggcaccttccctttgtaggcggcaaatcgtgtatagatagcgaagacgcaaagcagatccttgatgagattcgcgaggcgatcccgtccgaagtgcgcaaggcgaaggccatcgtcgcagaccgcgcccagatcatcagcgaggcacagcgcgaggccgagaccatcgtgcgcgtcgcagaggagaaggcaaaagcactcgtcaaccaggaagagatcgtgcgccaggcacaggcaaaggcaaacgacatcatggcgcagacgcaggagaagttccgcagcatgcagaaggcctccaacgactatgtggaagatctgctccgccgcacagacgacgcgatgagcgccaaccttgcagagttgagaaagacccgccagtccatccacggcacgagcgtacagcagtaatttaagagctttaaacggcagttcgcggcagctgggcgagctgccgtttttgttaaaatgagcgaacggaaacggcggtttaaagtctttagtccagttttcttcgagaaaacttgcggattcttagggcagcgccctaagtcgccattcgcaatggcgaaatccttttgcctatccaaaaactaagaaggtaacctaaaacgtccactggacgttttaggtgtagagaacccggttgcatggggtttcctgaaaaggcggcagcgccgctctttttataaatgacctacgttttccacaaaaagcgtgtaaatggagccgcttccgaaaaccgggaatgtgaacaaactgcaaaagtttttttgcatgagaatgcacagaattttcaacatgacgctattttgccgaaaatcggaaaatatacgaacaaaacccaagaaaaatatcggaaatccgcgctttttcatcgaacatggtaaacataaatttttttgccgcgggttgattttctatgtgggataaggtataatggacgtgcaagcagcgaaaaccctgcggaaaaccgcatgggctttggattttcattgccttttcgccccgcttggcgctcatcagcccggcttttttcgggtaaagttcaatgaggagtgtctggcggaacgcatccgttccgccggacaaatatatcatgagtgaaattcattttgagcataaaccggtgctgttcaaagagaccatcgagtccttgaacatcgacccggaaggcacctatatagacggcaccgcgggcggcggcggccactccggcgcgattttacagcgcctgacaacgggcacgttgctttccatcgaccgcgacccggacgccattgccgttgtgaaagagcggctcggtaaatatcccggctccgtcgttgccatgggtaacttctgcgatatggacaagatcgcgttagagcacggcatcgttaatgtcgacggcgtgctgctcgatatcggcgtttcgtcctatcagctcgataccgcagagcgcggcttttcctaccacgccgacgccccgctcgatatgcgcatgagccaaagcggcacctcggccgcagaccttgtaaacacactctcttggcaggaattggccgagatcatcagtcgttacggcgaagataaaagcgcggtgcgcattgcaaagggcattgtgaaagcgcgcgaagaaaaaccgattgaaactacattagagcttgcggagatcatccgcgaaagcgtgccggcagcggtgcgccgcgcggagggtcatccggccagaagaacgtttcaggcgctgcgcattgcggtaaacggcgagctggacgcgctcaaaaagggtcttgcggcggcgttcgggctgttaaagtccggcggcaggctttccgtcatcacgtttcattcgcttgaagaccgtatcgtcaagcagcagatgaacaagtggtgcgagggctgcacctgcccgaaggatttccccgtgtgcgtgtgcggcaacaagccgaagggcaagctcatctacaaaaagggtcttgcgccgagtgaggaagagcttcgcgaaaacccgcgcgcccgcagcgcaaggctgcgcgttattgaaaaactgtgagattttgaaagattagggtatccctgagagaatacagctgaatttgttgggataagtttccgaaaggaggaaacaacatggcatctacatcaaacgcatacgattttgatcttttcgacagcagagatcacggcagcgcggcaccgaagcttccggagccgaaagcgccccaaaaacaaaaacagaaaaacaatgtggtgaagctggatgaaaaacagctgcgccgcagtcacagacacagtgcaaatacggtcaaaatgctcatgaatcttgcggtggtgctggtcatcgtcggcgccatcggtgcggtggtgttcagtcaggtgcagctcacggagctcaccgatgagatcaacacggcgaacgagagcctttcgcaggagaaaagcattgccattcagctcgaaatgcaggcggcctccaagctcaatacggaggagatcgagcagatcgcgcgcgaaaagctcggcatggaaaaggtagcggacgggcagacctcctacatcagcctcacgcaggatgatgagggcaccgtagtgcaggccgaaaagacaccgaacctgttggaccgtatctggcaggtcttgcagtcgctcttttcctgatttagcctttatacatacgaattttttgcggatacgctgctattttgcggcatgaaagaatacaaatgggttatgcggcccccggcagaggggaatttgagaggagagttgagagtttattcttaactctcatttttcggtatacggcaacttttggctgcgaatgaagggcgcagcagaaaggacggcattttttacatggcaaaatcaaatcgttccggcgtctggcagcgcacaatggtcatcgtgggctttgtgctggtgctcgggtttggcgccgttatcacaaaccttgtccgcctgcagcttgtcaacggcgaaaccttaaagaccgatgcggtcgaccagagtttgcaatccacgcagcttacgccctcgcgcggcaccatttacgacgccacgggcacaaaggtcttggcgcagagcgccagcgtgtggacggtcgccttggagccgaactacatcgacgaaggcgacgacgtgaagattgcaaagggcctttccgaaattttagggctcgattacgacgctgtcctgaaaaaagcgcagcagaacagctactttgtctatgttaagcgcaaggtggagaccgaggtgcgcgatgagatcgtgcagtatatcaaggacgaaaagatcggccgcggcatcacgctgatggaagattacaagcgctattatccctacggcaccacggcttctacggtgctcggcttcacgggcacggataaccagggtcttgcgggcattgaaacggaatacgacagcgagctttccggcacggcgggccgccttgtcagcgcgaagaacgcacagggcgatgacatgccgttccagtatgaccaatacgtgcaggcacaggacggctacgaccttgtgctcacgatcgacgagaccgcgcagagcatcgtagaaaagcatctgcaggcgggccttgaggcctgcggcgcgctggagggcggcacggccgttttgatgaatgtcaagaccggcgcgattttggcgctttccacaaagggcgactacgacccgaacgacccattcaccatttcgcaggaggccgaggacgccatcccggaaaaggtggaagacgcgctgcaaaaggcgcaggaaaaggagcagcaggaattaaacaccttacagcttgccatcgataacgccgagaccgacgaggcgcgcgcggaagcgaaaaaagcccttgcggattacgagcgcatcgacgtcaccacgctgcgcgatgagctcaccgatcaaatgtgggccgaggcgcagaacaagcagtggcgaaacaaagccgtcagcgatacgtactaccccggttccgttttcaaaatggtcacgggctccatggcaatggaatccggtgtggtctccgaagactccacgtacacctgcaccggccagtgggtgtttgatgattccaccatcgaccccatcagctgttggtaccacgccggtcacggcacggaaacgctggtggacggcgtttgcaattcctgcaacccgtacatgatctggctgggccagaaaatgggccgccacacattcttcaatttctttgaagccttcggctttacgcagcgcacgggcatcgacctgcccggcgaagcagacagcctttattttagcgaagacgagctcaatatcgtcgagcttgcaacgtcttcgttcggccagaatttctccatcacaccgattcagatgatcacggccattgctgccgtggcaaacggcggttaccttgtgcagccgcacgtcgtagaccgcatgctggacagcgacggcaacattgtcaaaacgaccgataccagctacaagcgtcaggtcatctccgaagatgtttccaagcgcatgacggccattctccagaaaaatgccacaagcggaagcggcaaaaacggttatgtcgccggttaccgcgtggcgggcaagaccggtacgtccgaaaaagtcgcactgtattatcaggatctggcagagggaaacgaccgcggcatgcagtacgtcgtttcctacggcggctacgccccggcggatgacccgcagtacgccttgctcgttttctacgacgagccgcagatcggcggcgcgtccggcggcgcgcaggccggcccgatcttcgctgccatcatggaagaggtgctcccgtacctcggcgtagacccgcagtatacggaatcggaatatgaaaatctctccgctaccgcgccgaacgtcattggcatgaccatggcagaagcgaaaagccatctggaagagcagggcttcagcggcacggttgtcggcgacgccgaagacgacgcgctcgtcacggtgcaggtgccgtctccgggtgcatctatcccgaaggaaggcatggtcgcgctttacaccgaagagccggatcccgaaacgtatgtggaggtaccgagcttcatcggctatgacatcgatacttgccgctacttggcgggccttgccgatgtgcaggtgctcgttgtgggcgacggcgattccggctatgcacaaagtcaggatatcgcagagggcaccaaggtcaagcgcggctccgtcatccgcatttcgtttgtcagctccggcggcgtcgaagcggcgggcaacacctcaacgaacagcgaagagtaaaaacatacattgagagggtaggaaaggaagttcataacgtatggatattgtactgtattgccttgcaatcgtcattgcggcggtcatcacagggctgctcggctacttcatggtgccgtttctgcacaagatcaaatttggccagaccattcgagaggtcggccccagctggcataaaaataaacagggcacgcccaccatgggcggcctcatgttcatcatcggcagctccgtcgcggcggtcatctgcatcgcatttttgtggctgaacggcggcgcggaaacgcagctcatgttcgtcaaggtcatggcgggcgcgctcatggcggtgggctttggtatcgtcggttttttagatgattacatcagcatcaaaaagcatcgcaacctcggtctcaccgagattcaaaagctcattttgcagttcatcatcgtcggcgcctacctgctttccgtcgcacttgcgggcggcaccaccgaaacggttatcccgttccttggctccgttgacctcggcttcttctactacattctggcggctgtcttcatcgtcggcatggtcaacgccgtgaacttcacagacggcatcgacggcctcaatacgtccgtcacgctcgtcgtcgcactcgtcttctctgttatcgcgatgcttttaaaccgcgtggggctttcactttacgcggcggccatcgtcggtgcgatgatcggcttcctgttctggaacgccaacccggctaaggtcttcatgggcgatacaggctcgctgttcctcggcggcgcagtgtgcgcgctggcgttcggcgtggatatgccgattctgctcatcctcatcggtattatctatattgtagagattctctctgtcgtcttacaggttacatactttaaaatttcgcacggcaaacgcattttcaaaatggcgccgatccaccaccactttgaaatgtgcggctggaacgagaataagatttgcttcgtgttcagcggcgttacactttttgccggtatcatcggcgtacttttggcggtgttcggctgctaaacgcctaaaaatgggataaaatagaaatcaactgaaaaaaggaggtttgcagcaatggcgcagacaagacgctccacggcgcgcgggcttgaacaggtcccaagtcgccggttatccgccgtgcccgcagaagaggcggcatccgcagccgcaaggcgcggcaaacggcgcgggcgcatcaaatatagaattttcactttgggtctcggccttgacatgaccatgctgtttttgatccttgtgctgcttgccgtgggacttgtcatgatgttctccgcaagctatgcctacgcgtattactactacggaaacagctattacttcattctccgtcagggtatgttcgccttagtcggtgttgtgctgatgcttgccatctctacattcgattatcaccagctgcataaactgaacctgcccgttttcgccgtctccattcttttgcttttgatggtgctcgtctttaagggcacaaaattggcgccgaacaaaggcggcgcggtgcgctggctgaacctcggcttcgtcgaattccagccgtctgagatcgcaaagttcgcgctcatcttgatgtttgcgcacctcatcgcgctgtacggcgaaaggatgaaaaccttccgctacggctttttgccgttcttcggtattttgggcctcatctgcgtgctcgtcatcgcggaaaaacacgtttccgccaccatcatcatctgcctcatcgcgtttatcatgatgttcgtcggcggcacaaagttccgctatttcgccgtcatcggcggtgcggcggcagccgccatcggcgcgctcgtgctgttttcctcaaaatttgcctacgccatggaccgtgtccacggctggcttgacccgttcaacccgccggagggcgtcgatacatggcagacggtgcagtcactctacgccatcggctccgggcagctgctcggcgtcggcatcggacagtcgagacaaaagtatctctacatcccggagccgcaaaacgacttcgtttttgccgtagtgtgcgaggagctcggcttcatcggcgcgcttattgtcattatcctgtttgcgcttttcatctggcgcggcgtatatatcgcgctgcatgcgcgtgatcgcttcggcaccatgctggcgcttggcatcacgttccagttcggcgttcaggctatcctcaacatctgcgttgtcacaaacaccatcccgaacaccggcatcagcctgccgttcttcagcttcggcggcacggcgctcatcatgcttcttgcggaaatgggcgtgctgctgtcggtctcgcggcattccaatacagaaaaaatgtaaaaggggtattcaattatgcgtgtgttatttgcaggcggcggcaccgccggccacatcaatccggcgcttgcggcggccggttatctgcgctccaagcagccggatgccgaaatcctgtacgtcggcaacaagggcggcatggaagagcgtcttgtgcccgcagcgggcttcgatttcaaaaccatccgcatctcgggttttcaacgtaaattaacggcgaagaacatccgccgcaacatcaaaaccgtgttccgcctgttctcctcgtctatcgagtccgagcgcatcatcaaggcgtttaagccggatatttgcgtcggcaccggcggttacgtcagcggccccgtcattcgcgccgcacagaagctcggcattcccaccgttatccacgagcagaacgcctatcccggcatgacgactaaagcgcttgcaaagcacgcggagtgcgtcatgctcgccgtggaggacgcgaaaaagtacctcgaccgcaaagataactgcgtcttcaccggcaacccggtgcgcgtttccgttttgcaggccgagcgcgaagccgcccgcaaggcgctgaacctcgacgatcgcccgcttgtgctgtcattcggcggcagcctcggcgcagcggcgctcaataaagccgcggcatacatgctcggtgaaagcgccaaagagaagaaatatcagcacatccacggctacggccagcacgatgaaaaattcctcgacgaagtgcacgcagcgggtgtaaaggaagaagaaaatccgcagattcgcatgctcgagtacatagacaacatgccggagtgcctcgccgccgccgacctcgtcatcggtcgtgccggcgccatcaccttaacggagatcgaagccacgggcaagtgctccattctgattccgtccccgaacgttgccgaaaatcaccagttccataacgccatggcgctcgtaaaccgcgatgccgccgtgatgatcgaagaaaaagacctcaccggtgaaaagctgtgggaaacggtgaacaccatcctttccgagccgggccgcgccgaagagatcggcaaaaacgcgaaagccatggccgtgctggacgcaaataaccgcatttacaacatcatttgcgaaaaagcaaaaaagtaaaccgtaaaacgcatttcaggcggacataccccaaaatttttccgctgcatactatgaccgtatccaaaggcgcgctttctgccgccttacagaatacggggtgtgtatatggaagaatatgaactggaacatacgggctgtgcccggcaggaagcggttttggtgcgcggcggcaatcgtctttgcggcgagctcaccgtgcagggcgcgaaaaacagcacgctgccgctgcttgcggcggcactcctctgtgagggcgaaacggtgctgcataactgccccgcactgtccgatgtgcacacggcagtcaccattttgcggcggctcggatgccgctgtacccacacgggcgataccttaacggtctgcgcggacggcatgacccgctgcgatattccccacagcctcatgcgggagatgcgctcgtccatcgtgtttttgggcgcgattctgtcccgctgcggcgaagcaaggttgtcgtttcccggcgggtgcgagcttggcccaaggcccatcgatctgcatttggaggcgctgcgcaagctcggcgcagaaattcgcgaagagcacggctgccttttatgtaccgcgcccggcgggttgcgcggcgggttcgtctcgcttgcgttcccaagcgtcggcgcaacggaaaacctgctgctcgccgccgcccgcgccaagggcacaacggtgctcacaaacgccgcgcgtgagccggagattgaggatctcgccgggtacttaaaccgctgcggcgcacacattcacggcgcgggcgaaagctgcatcgtcatcgaaggcgtgccgcacctttacggcagcacatacaccgtcatgccggaccgcatcgccgccgcaacatacatggccgcggccgccgtcacgggcggtacggtgctgctgcgtgatgtcaacagcgagcaccttttgccggttttgtcggcgtttgaaagcaccggctgcgccgtgatgcagtccggcagcgaattattattgcgcgcaccgcagagattaaaacccgtgcgtcacgtgcgcaccatgccgtaccccggtttccctacggatgctcaggcgcccgtcatgaccatggcggcggtgggggacggcaccagtatttttgtagagaacatttttgaaagccgctataagcatgccggtgagctcaaccggctcggcgcgaagatcaagttagagggcaaggtggctgtcatagagggcgtgccgcagctttccggtgcgccggtctcggcagaggatttgcgcggcggcgcggcgcttgtcatcgcaggccttgcggcgcagggcgaaacacaggtgatgcacccgcagtacatcgaccgcggctatgcgcactttgaagagaatttaagggcgctcggcgcagacgtataccgaatatagagcgaaaagtaagagataaaacgtgaaaaacggaggctgaacatggcgcgtactccacgcagcgcagcggaaaagctcgcaatgagaaagaaaaaaagcagggcgctgctcctgttcaatataatcgcattcagcgtcgtcgtcatcggcgcggttcttttgtgcatcttcgtgtttttcaaggtgggcaacgtcacatttacgtcagatgccggctacgatgaagccgatatccgccgcgtgtgcggcatcaacgagggcgataacctcgtgctgctggaaacggaaagccgcgaaaaagcgcttgagcaccgtttcccgtacattgaaagcgcaaagattgtaaagcatatcccttccaccattgaaattgaaattacccccgccgaaacggcgttttccgtcgcgtgcgacgcgggctatctctatgtaagtgcttccggcaaggtgctggagatcgcttcacagccgtgcgagggcacgactgtggtgctcggggcaaatcccacgaacacaaagcccagcgaaacgatcacgttcggcgatgattccgtcaaagaagtctataacgccatcgcggagcagatgacgaaaaacgagacgcagaacgtcacggagatcaacatgacgaacccctacgaccttacgctgacgtatgataaccgcatcacgttccgtttcggcaacatgaacggcatgtcctacaagatggcgtttggcctcgagatgctgcgtcaaatggaaacgagcggcgagatcaccgaggagaccgtcggctccatcgatctttccgttgtgccggagaaaaataaggcgttttacgaggaagaccgcaccgcagcctccgccacgcccgcacccggtgatgctgcaggccgcacggacggctcagacagcaccgcaaacggcgacggggagaatggcgatactgccaatcccacgggtgataccgacggcattacggaccccgcagcagacgacagcggtgacaacacaggcgacgccgaaaacgtgtaaaatttggaaacgtttccctgtttttcgggtaatttgaacagccccggcaccatagatttcccgaaaaccgctgtaaagtaaaaatatttgcaaaggcccacttttttgccgctttcatcttgaattttggcgtgaaaagtgataaattatagtgtatgaagctatgtaaagctgaaagactgtaaagaactgtaaagatatggccctttatgggacgctatccggcggatttgatcgaagctcgagagaaaaccgttttgaatccggaggcggcgtgatgaatgaaaatcccggatccgtgcggatcgttaacggttaaagaccaaatcaaggaggaacataaaatgccgtttgaaattgataacatgcttgaagagaccccccagaccattaaggtcgttggtgtaggcggcggcggcggaaacgccgtaaaccgcatggcagatgccggcgtgcagcacgtcgagctcgtctgcatgaatacagaccgtcaggcactgtcccgctcgcaggccaagacccgcgtgcagatcggtgaaaagaatacacagggcagaggcgcaggctccaagccggaggttggcgcaaaggctgccgaggagagccgcgagctgatcgcagctaccctcaagggcgcagacatggtcttcgtcaccgccggtatgggcggcggcaccggcacgggtgcagcaccggtcgttgcagagattgcaaaggatatgggtgccctcaccgtcggcatcgtcacaaagccgttcgcttttgaaggcaagcgccgtatggatcaggcagaaaagggcattgcagagctgcgcaagcacgtcgattccctcgttgtcatcccgaacgaaagactgaagctcgtcagcgagcagcgtattacgcttgcaaacgcattcagcatcgccgatgacgttctccgtcagggcgtacagagcatttccgacctcatccagatcccgggcatcgtcaacctcgacttcgaggatgtcaagtccatcatgcaggatgcaggctacgcacacatgggcgtcggtcgtgcggcaggcaaggacaaggcagagcaggcagctgttgcggctatctccagtccgctgcttgagaccgctatcgcaggcgctaagggcgtcatcatcaacatcaagtcctctccggacatcgccctcgacgagatcgatgtcgcgtctcagctcatcaccgagcgcgcaagcgaggatgcaaacatcatttggggtgctgcattcgacgagacgatggaagacgagatgatggtcaccgttatcgcgaccggcttcgacggcatgaacggcgaaaagacccagaagcccgcagctccggctatcagcgacgcagacctctttggcaacccgtctgcgccgagcaccggcagcacaacttccgcgaagagcgacgatgataccttctccgacatcatgtccatcttcaacagaaagtaatttagaattacaatcaagcagggtatcggtctcgataccctgtctttataaaatgtacttttgggaggaaaacaaaatgaacttgatcaaaggcattcaccacgtggcactgcgtccgacgtatgcgcagtttgaaaaagcaaaaacgttctatcttgacctgctcggcctcaaggtcgtgcgccagtggggcgacgaaaaatacccctgcatgatgatctccaccggggacaacagctgcatcgaagtgctgcccgtcccggaagagaacgatgtgccgctggaaggcaagtttgcccatctcgcgctcgcaacagatgacaccgacggttgtgtcgcccgtgtccgtgaagccggctacgagatcaccatcgaaccgaaagatgtagagctttccgacatcaccgcgcgcattgcgttctgcaccggcccctgcggcgaaatcgtcgagttctttgaccagaagtaagccgatttacaaaattaaatcacccaaaagcagagtttgaggagctttcctcaagctctgcttgcatatttggcgggttttcagccgctaaccaaaaggagattttcgttatgaccgatctcattttgcggatctttgtccgcgatcataaaaataccgaggatcctgccgtgcgcgacaaatgcggccgcgtggcgggtgccgtcggtatcgtcacaaattttctgctttttttaatgaagattattgtcggcacggcttttcacagtgtttccgtcacggccgatgccgtcaacaacctcacagattccggctcgtccgttgtcacgctcatcggctttaaaatggcaagtaagccggcggatgaaaagcacccgttcggccacgcgcgcatcgagtatctttcgggtgtcatcgtctcgttcatcgtcattttcctcgggcttcagctcggcatgtcgtccgttgagaaaatcctcacaccggaggaaaacgccctcacgcccgtcgccctcgttgtgctcgtcatttccattctggcaaagctctggcagtgcctcttttaccgcaaggtcggccgcatgatcaaatccgagtccgtcgaagccacgtccaaggacagccgcaacgatgtcatcgccacaagcgtcgtgctgctcggcgccgtcatcaccatgctcaccggcgtgaatttggacggctacatgggcgcggcggttgcgctgttcattgtgttctccggcgtgcaacttacaatcagcaccgcagatcctctcctcggccaagcgccggagggcgagctcgtacagaccattaccgagaaaatgctctcgtaccccggcatcatcggcatgcatgaccttgctgtgcacaactacggcgtgggccgctgttttgcctctgcccattgtgaggtcgatgccaaaaacgacattctcgtcagccacgatcttatcgataacattgagcgcgatttcagccgtgacctcggtatccacatggtcattcaccttgaccccgttatcgtcggcgatgcccgtaccgatgcgctgcactgcaaagtgcagtcgctcgtcaccgcgctgtaccccaccgtcaccattcacgatttccgtgtcatctggggcgttacgcacagtaatatcgtgttcgacgcagccgtaccgtttgcggtgaaggacagcgacgccgtcatcacccaaaagttagaggccgaaattcaaaagctcgatcccgattatcgcaccgttgtcaccatagatcgcagataagtaaagcacgccgtttcccgaaattcatcggaaatgggcgtgctttttaatatttatattaaattataaatatttatttcaacctgccaagcagcgttttgagaaaatcatacacgcggtcaaacgattttagattcatgtattcgtctgtcgtgtggcagttttcgccgatgggcgcgaacatcacaatgtccagcccctccatgcgcggcagtaaagagcagcattcaagtccgcccgggcacgccgtttccatcatctcgtggccgtacacttctttcatcaggtcggccgtcatgcggcgcatgtaggagttcggctggtattcccaggagtcatagcgcaggctcgtctcaagcgtgaagccgcagagtttagccaagcgcttcacgcggccgagcacaccgtttttaaagctgcggttcgccgcacggtcggacatcaccagttcaaatgcgctgccgtttaacgataccgtgcccacgttgttcgtcgccgtcatctcctcgcccgcggtccggattgccaccgtgttcgagggcatcagatagatcaaatcgacaatcgcctgcgtatcggcatccgaaagcatctcgttcgctgccgtgtcgcggatttcaagcgtcaaattctgcttgccgtcctgcaattcgcggtcgatcttctcaagctcaccgtttaaaatcgctttcactgcgtccggctcgtcgcagaggatcaccgttttcgtctccaccggcgcatagttttccgcttcgccgcccgccatggtggaaagtcggtacgccgcgccgttttcggaaagcgcattaagcaaacgcgccgtgatcttaatcgcattgaactgctccgggtgcaccattgcgccggagtgcaccggctgcacgccggaaaccgtcagcatgagggccgcgccctttgcaggctccgtctcgcacgttttcgtcagcttcatcaggtcgctcgtaaagcaggaaacgcagcttgtgtattccaccgtctcgcccatcacgtcaagaccgatcattcttctggatttcagcttgcccgcgtccagcgcgtccacgccgttgcagccgttttcctcctgcaccgtaaagacgagctccagcggcgggtgggggaaatcctcctccatcacggccagcatgtacgccacgccgtaaccgtcgtccgcgccgagcgttgtatccttcgcgcggatgtcgcccttgtcgtccacataaatctcaatggggtcatgcgaaaaatcatgcgtgctctcgggtgttttcacgcacaccatatccatgtgaccctccagcatcacgacaggcgcgtcttcgtaccctttagaagccggcttgcgcacgatgacattccaaaatttgtcctgctcgtagtttaaaccgagcttttccgcaacgaaacacacgtagtcgcttacggctttttcttcggttgaggggtgcggaatgccgcagattgcctcaaaatatttctggttcggttttgtttggtcgagtacgaatgccatgttaaacgtcctttccgcgctcacgtctccgaagaggagatgaggtatttgaaaatctgcagcttgttttcttcgtacagcccaagctgctcgtataattccttgtagtagctgaaaagcgccgtgcgcgccgtaatcgccgtgcgcaccttcgtcagatgcaccgcgctgccggggttgtcgtagtagttgtagattggcgtagtcagcgcaaaaaaccgttctgcatagcgtatgtaagtcaaattaaaatacaggtcttcgctccacgtcatttcctcgctgcaccgcacgtccgtgtgtgcgcgcaccaaatcggcgcggtaaagcttgttccacatcacgccgtagtaaaagctcgccggctcctgcatcagcccgcaggcgaattcctcctttgtcataaagcccatcggcagaaagccgaatgtctggaatttcgccaaccgctccgtcagctgcttctttttattcggcaaaagcgggtcaagcttcgcttcctttttcggcttgtacggcacaatgcggttatacgccgcaatgacgagatcggcgttgttatcctccgcacgctgaacgaggagctctgtcgcaaacggctccagtgtgtcgtccgcgtccacaaactgcaaatatttgccccgcgccatgcgcatgccgaggttccgcgtcgccgaaacgccggagttttccttatcaatcaaaacgatgcgcgcgtctgccttcgagagcatctcgcacaccgggtagctcacgtccttagagccgtcgttcaaaagcaatatttcaagattttcatacgtctgccgccgaatgctctccacgcagcgcacaatgttgttctgcgcgttgtagatcggcacgatcacgctgacaagcggtttctgcatcaaaatacttcctttcctgcatcatgctccgtttttccctattttaccgcagaaagttccggaagaaaagactttttgaacattctgcttgcaaatccggtaaacacactaaattgaccaatgcaaaattagccaaaacgcatattgacttaaagcaaacttttaatgttatagaaatatatgcggagccacacccgcacataacgaattcttaggaggagttttcgtgaaacccaaggtttatttcacaaaaacggtcacccctgaaaaggtcattgaaatgtataagcagctcgattgcaagctgcccggcaacgtcgccattaaggtacattccggcgagttcggcaacaaaaacttcctgcgccacccgattgacgaaccaacctgaatatagtagaatacaggtaacgaacaacatttggaggatcgggatatgaacaaaagtcaaatggcaaagcttgcggcagcggccggtgtgaacggccttatgtatgacccgaatgcagagggcgttttcggcaatgtgcaggggtataccgtcaccattatgccgaacgccaacaaccgcgtctactatatgctttcgctttcggtctcgcgcatgggcatggcgccgaaccccgcggatttcaaaccgctcgagaaaatgaataaggttttgagcggctgtaccgtgcagcgtttccgcgtcaatttccttgtgaagctctccggcaataaagataaaatggcagaggccctgcgcagtgcgcttgatacgctcatcacgtttctcagaacaaacgggtatacaaactgctgcgagcattgcggtcgcccggagggcgtagatgcctacaccgtctccggcaacgcgtaccttttgtgtgaaccgtgcttcgggcagatcagcgaagccgccgcgcagcagaaccagacaaaaatgcagaagcaggagcaggttttgcccggtatcgtgggtgcgctcatcggttcgcttatcggcgccgtcgtcatcgtcatcgtcggtcagctcggctacgtcgccgccgtttccggccttgtcatggccatctgcacgttaaagggctacgaaatgctcggcaaaaagctcggcacaccgggcatcatcatttcctgcgttttgatgctcctgatgatcttccttgcgtatcaggccgattggtcaatcaccgcggcgcagttctatgagaccgatttcttcaccgcgttccgcgccatgatggatctcatcaaagaaggctatgtcgattccggcgattacttcggcggccttgcacaggtctatctcttcgccgtcatcggtgccgtgcctaccatcatcgccatggcaaagggcgcaaagcacatggtcaccaccgccaaaatgcgcagcgcctacgcacccgtttcggcacccgcagcagcttccgtgcagatgcccgtgcagcccgcttcttcgcccactgctccgcagaacgtcgaaaaagacatcgaaaagtaaaattcaaaaaccatcgcccgcaggcaaccgttttccgtgcctgcgggcgattttttacgtctttttgttctgatttttgagcttttcggcctctgcctgcgctttttttaactgctcctgcgcaagcttggcgcgcttcattgcgtcttccattttctgtgcggcacgctccgctcgcttttgggcttcctccacgcgctgccgcgcttcttcggcttccttttgcgcctcctccaccaaacgcacatcatcgtctgcatcaggattttgcacggtgtcctgtacgggttcaggcgcaggtttaatattccagctcaaaaattctggcgcagatgggggcggggagatctaccgtcagcgtgcccttttccgggttccatgcgcatttcgtgttgtggtttgcggggtatgcgcagcgcacatttacgtgctcgttgccgcgcaggaaatccacgggcagcgtgcagcggccgtccggcgcgccgcgtctccacacggtgatgtacgctttgtgcgcggttttaaggcccagcgagacccacgtgtccgcaaagtgcgacgtaccgagcggccagaacggcagcgcgcgcttgatgtcgccgcggattgtcttgtaataatcgagcgcttccttgacgagcgtgaagtcctcctcgggaatttccgccaaatgaccgctctggtggatgcgctgcatcagcgcattgcacatattaaatacggcttcctcgcgtccgccgcccttcatcgggtagctccaaatggcgctctgctccggcgtcagacccgagggcgcgttcgccgcaatggacgcatagcgcaggtagtcttcctggtcgctcgtagactgaatactgtggcgcgagagcatcgcgtagtcgatgcgcatgccgcccgaggaacagttttcaatcacaaggtcggggtagcgggcaaagacggaatcgagccaagcaagatatgcgcgctcgtgcccgagtaaaccgtcgcccacgctgtcggcgtttaattccgtgccgatgcccggctcaatgttgtaatccatcttgatgtagcccacgtggtagtcgcgtacaaggcggtcaacgacctcatttgcgtgctccacgacctccgggttgcggaaatcgagctgccagcggctgcggtcgtgcacctttttgccgtggcgtgtgaagaaccagtccgggtgcacgcgcgcggccttcgggcagcaaatgcccattacttcaatttcgagccacacgcccgggatcatgcccttcgagcggatgtagtccatcacttcctcaaggccgttcgggaaacgttccttactcggcagccattcgcccacgttgtcccaccagaagccgtccgcgtaccagcctgcgtccacgcagaagtattcgcagcccgccttgtgcgccgcatcgatgagcggcagctctttcgccgttgttgggttgccccacaggcagttcatgtagtcgttgaaaatgacgcacagcttctcgttgtccgcatttttgcggcgaatcatgcggcggtacttcgtcagctcgcccatggcgtcatcaaatttgccgagcgtggagcctacgcacaccggcactgtcgtgaatgtttcgcccggctgcaaattcttccaccagtgcgattccgtttccgtcgggccgcttaactgaatgtagaagttgcccatctggtcgctgatctcccagtgccacgagccgttgtgctcgatctgccagaataaattggagcccgtttccgtgttttcaagcagacccatcggcaggtattcctttgtagaccagttgccgatgttcgtcgcaccgatcaccttagaggagcgctgaatttcctcgggctggcagcgggcgagaccgagctgcgggaaggtgtagctttcccactgcatttcgcgctgccagccgttgtgcgggtaccagacacgcattttgtcgtcggtcgaaagcataccctctttttcgatgccggtgagggcaaaggaggaaacgtattccagcccctgcggctctgtgccgacatttttcacgtccgtccagcagcgtacagcctgaacgccgttataaaactgcatgtgcgaaatcgtttcaataccgcagatcttatcttccatgtggatttccagcttgcggccgaactcgttgtgcttgtccgcaaaatagacgagcttcatgcggtcgccggggcttgtggaaatgtatttgttgccgtggcgctcgcccggtcggttttgcccggagatcataatttccaagagattgtatcgctcggtgttcagacgcaagccgcccgtctcgcggtcgtgcacgtgcagcagactgcgctcgtcaaaggggagcgcagagaagtgcagcagcttgcagccgaaatcttccgtcttttcaaaaacgagatgcagcccgttttcgtcaatttgaatcaaatccatagtataagcctttccgcagataaatctgctgtgatctatgctgagttgtctgtacaaatagtagcacaatcggagaggcttttcaagggggattatcggtcgcggctttgctccgcacgcatgccgagcgtggaatactgcaaagcgtgcgaaagtcgtgccgaagccttttgcaggtgcttgcacaccgtgccgcgcgtcaggtgaagctcgtccgcaatctcctgcattgtcagccgctcgccgtagtaaagctgcacgcagtcgcgctggcggtcggtcagctcattgccgatggcgcgccgcagtaaaacctgcgcttctaaaagctcatttttgtttgtctctgcgccgatgcggctgagtagcttcgcctgccgtgcaccggcggaaagaggcttatatccgctcacgaaaccgccctccttccgcgcttttgcagcgcatggcctgttaccaggcactccaaatacatggtgtaaagcatctgcacacgctgggcctgctcgcctgcaatgtcatagtcgcgttcggcgcggatgacgagcagccgccgtttgatgcgctccgcctcatccaaatactcctgtccccaggaaatgtaatcgttcacttgcagtcacgatcctttcgtttcaaaatagaacatgtgttcgtcgactctcatcataaacaaaaatttccgaaatgtcaatcgaacacggaacaaatgttcaaaagatgtcctatgatgtcctgcgatgtccgcttttctgcatatttatatggaattatttacattttggggctgttattttgcgcttttttgatatataataaaggtgtatttaaacttgaaatgactgaacgccttggcgttttgaccgaaaggagttttaccatgaactttttgaagaatatctcggccgcatttaagaccgccggcggcgccgtacagggcgctgtgaaagtggtagaggaaaagaaccgccgcactgcgctcatgaatcgcctgcgcaccgttatccgctgtgaggaaaaggcagaggagcgcgcctatctcgctctcggccgctactactaccacaacctgcgcaatgcagagaacaccgttacggagccgtactgcatcgacattgaagccgcccagaagcgcatcgatgccgctgtggagaagctggaagccctgacccatgaggatgacagcgaagcggaagaagaggagatcacccttgatgacgtgcaggagtacactcccacgccggaagaggaaaaggaagccgaagaagccgcgttcgtgccggacggtaccgtagacgaagccgtggaagcggcagagcctgccgccgagcagccggaaacgactgagcccgaaaaagacgaaagcgaagaagttccctacgaataatgcgctttaaaatgaacgttaaaaggcggacctgaggcccgcttaattccttgcgcggaaaaacgcccaccttttgcgccggggcaggttccgtttgcagaaagtgagtgaatttgatgtctacgaagatacagaaagatattgtctgccccgcctgtggccagacgcagaaattagagatgtacacaagcgtcaatgcggaggaaaaccccgagctgcgccgcgacattctgcgcgaatccatgtttgactgggaatgcctccactgcggctacaccgcgcagatggcgtaccccatgatctaccatgacccaatgaacgcgtttatgatctgtctgcgcccctccggcgctgtttccggcgcggagcctatccccgccgtgcgtgcgctgaaaaagcgcagcgtgaaaaacccgcaggagttaaaggagaaaatcctcattttcgaggccggcctcgatgatgccgccgtggagcttgtgaaaaacgccatcgtcaccgtggtgcgcaaaaatttggacggcaatgtgcacgcctatttctgcgccgcaacggaggaggaactgcgtttcgcgctgttcgtcaagggtcgtcaggagcccgtgtaccagaccaccaaaatggccgtgtaccgccagtcgcaggaggttttgcgcacgctcgattacaaatccccggacgatttcgccgtcgtcaactccaagctcgcccaaagccttttggacgaatataagtcgatctaacccaataaaagcaaacggcaccgcgtttttgtaacggtgccgtttttctatgcgcgcatgtgcacaagctttgcgttttgtaggtttacgggtaaatcacttcggcgcgtgtcacttcgccggtgccaaaattaccgtaatgcagtgtgaaatatgacgtttcaccgcttgaagcgtcctgcacttcgtcgatgagcaaaagtgtttcgttttgtgtgtctttcggctgcaagcggtaggagacgatgttcagtttctctccgagcgcagtctcgcccgttgcgtgcgaaatctcacaaatgttgtagtgctccgtaatatatgccgcggaaaagccggttttcagcttctctgcggggtgcagcctgatgtgcggcacggttttcgtcagcgccgcgaccatctgctccgtaacgccggtttggatgttctccgccgggtgcagcgcaggcaggctttctgccgaaacggaaatcgccaagataaatgtcaagatgagcgtaatacaagggataatgagctttttcatgggttcctccttccataacgaaaaagtgcaaagcctgtgttatggcttgagtataacagagcaaattcgatatgtcaataattttatattaaattattttaataatatgctttacaaattaagttttctgtggtaggataaaattacagaaatagcgcaatggggaggaatgacaatggcgaataacgacagcaccaagcgcgtgccgctggagcttttgtgcatgctcattttaaaggagggcgaccgctacggctacgagatggtgcaggagatcgaatcgcgcagcgggggacttttgtcgttcaacttggcctcggtgtacgtcgcactgcggcggttggaggagcgcgggtgtgtatcttcccgcaccgaaatgacggacgccgcccgcgcccgcatgcgcgtttactatcatttggatcctgcggcggaagcgtatctcacggagcagaaagaggaataccgccgcacggccgtaggcgtgcagaacgtgctgaaaagctgcgaggtgcaacatgaaaaggaagcctgaaagcgggtttgagcagtatttacgccgtatgtatcgggcggtaagcggcacgcgcgcagagaagaagcgtgagaccgcccgcgtgcaaagccttttgtgcgagattccccacgcagaaacgatgtcgtatgacattctttgtgcggtcgccggtacaccggagagctttgcagcgggatttcaaagccgccgaacccaaagtccgctcgtgctttcggcagttatgctgaccgtgctcgtgctcgcgttcatactcggcgccgcaatgggacaagcgcgcgaaaagacgcagaacggcgatgttgtgatgagctaccgctacgaagacggcagcttgcagacgcttttggaggaaaggccggagctgctggggtgaaagttttgtaaaaaagactccctctgtcagagggagtcttttaggttatgcgtgaaaatcatgcgatgctcaattaaacattgcgcggattgaattctggtgctgctcggtattgacggccatttcgttgacggcgaaaagcacgtccgtgatgccgtgctctgtgcagtaggtcggcaggtcgccttcaaagtagcggaagtccgccacgtgtacctcgtcaaagcttgcgccgaggaacggacccatggcgttgccgtaggagtccttcaccacaagcagcttgcggcccgtagaaaggtcgtggttcgtgatgcgcacgcagcccatatcgccgtgcaggtacatggcgtagccgaggctctcgtcgtggctattgaggctgtcggtttcctcaaaatactgcccgtcatacgaaatttcgcatgtgtagttgtacttcgggtcgtagagatcgagtgtatcggggttgttgttcagcacgtcttcgcttgtaacgtaggcaaggtagcccgtgaaatcagaggacgttttcgtgaagctgtcgagcgtcgtgggcgttacacctgccgcttcgcagaacttttcatacgcgtaaaacgcgccgagcggcgcccagtgggtatcggtatcaaaataaatgtcttcgttgttgtgcaggttcagcgcatcgtaaatatccaccgcggtgatgcttgcggaaagcgtattgttgaccgccatggtgttctcacgctgggaagcttcctcatagtaattgcgcacgcgctccggcacgccgaattccgagtgattcgggatgaccatgctgtacacctttgtgccggaaagctggcttgcacagtcattcagcatttcggcgtaggcggtcgccatgctgtcgctgccgtagaacatttcaaagcccttgttattgtagatgagaatgcccgaggatatgtggccctccgtgccgtcgtcatagatcggcggcggtgtcggctccggcgtggcggtcggctctgcagtgggagtaggtgtcggctctgccgttgcggcggcttccggtgtgggctccggcgtaggtgtggcggcagcgggtaagaacttgccgaacgcaccgaggctgtacgcaatgtaccccaaaatgccgatggccaaaacgatcatcacgatgacgatgggcacgacgggcgagtgctttcggcgcggcttatcgtcgtggccttcctcatattcttcgtactcttcgtagtcgtcttcgtcctcatacggctccggccgtggagcgggtgcaggcgcggggcgctccgagcggggcgcttcctgttgcggcgctgccggtgcgggatattcgcgtgtttcttcaaagccctcgggaccgtttttcggcgacttcggggtaaaatgcagattttctatggaggaggggacgcgcttttcgttttgtgacgattgctttgcgtacagcgtttccggcgtcagctcggaagccgcgctgcgcgggtcagcctttgcggcgcggcgcgctctgtcttcggcagaatacgggcgctggtttttgccggccatgtgctttgccattggatccatcctttctgtaaaaagggtcgtttattttctcaagaaaaaagccgcgcggaaacagaccgctgcggcttttcgatttccatgtccattatactggcttagagagaaattgtcaattcccgtatgctcagtgtgcgaccggcaaatatcccactttcttcatgaccttttgcaaagtacggcgcgcaatggcctctgcacgcggcgcggcttcgctgtagcacttttcaaggtatgccttgtccttgatgagctcgttatagcgcgcctgaatgggctcgagctccttgacgacggcttcgcccacggcggtcttgaaatcaccgtagccgcggccctcgaattccttttcgatttcgtcatagcttttgcccgtaatacagctgtaaatgcccatcaggttattgatgccggctttgttttcgccgtagtagacgcgggcttcactgtccgtgacagcgcgtttgaacttcttcatgatctccgccggggtatccagcatagtgatgaagcccgccgtgttttcatcggatttgctcatcttcttcgtcgggtcctgcaaagacatgatgcgcgcaccggttttcgggataagaccctccggcacgacgaatgtcggggagtaaagcccgttaaagcgctccgcaatgttgcggcaaagctcaaggtgctgcttctggtcggcaccgaccggcacgtaatcggcgttatacagcagaatgtccgccgccatcaggcttgggtaagtgaacagccccgcgtttacgttatcggcgtgctttgcggatttatccttaaactgcgtcatgcgggagagctcgccaaactgggtgtagcaactcaatacccatgcaagctgtgcgtgctccggcacctgactctggatgaagaaaatgctcttttccgggtcgatgccgagcgcgagcatcatcgcgtaggcggaaagcgtgtttttgcggaattctgccgggttctggcgtacggtgatggcgtgcaggtcggcaagcgcgtacacgcattcatagtcgttctgcagcgcgacgaagttcttcagcgcaccgaggtagttgccgagcgtgaacatgcccgtcggctgaatcatgctcaaaacgcgcttcttttttgtttcgggtgtggtgtttacggtattttccatggtgattttcctctctgatatcctttatttttccaccatctcgcggatggtctcgccaagcagcgtgatgccctttgtgagctgctcatcggtcggggtggagaaattgatgcggaacgcgtcgcacggctcgttttcatccgtcaaaaatgcggtgcccggcacaacgcaaaccttcttttcgagcgctttctgtacgaattccatcatgtcaacgcccttcggcaggtggcaccacgcgaacagaccgccgttgaacgggtcccacgtgatgtacggcgcaaggtgcttttccatgaggtcaaggagcaaagcgcgctttttcgtgtagatttttctaagccccgcaaggtgtgcgtcaaagtcatattccgtcatgaagcggtagcacagaacctgcgaccagatattcgtgtgcacgtcctgcccctgcttgcagacggtcattttggcgagaaccggctttgggccgatggcgtagcccacgcgcataccgggggagatgaccttagagaacgaaccggcgtagatgacgatgccgtccgtatcaaacgacttgatgctcggcagcggctcgccttcatagtaaaggtcaccgtaggggttgtcttcgagaatcattacgtcgtgcgctttggcaagctcatacaggcggtgacgcttttcaaggctcatcgtgatgccggaggggttttgaaagtttggaatcgtatagatgaacttcacgttcttttcggtctcgagcgccttttccagcgcttccatgttcatgccgtccgtgtccatcgggatgccgacgagctttgctttgtaggaacggaagtcgtttaaagagccgatgaagctcggcgcttcacaaataacggtttcaccttcgtttaagatggattttgtgaacagatccatgatctgctgtgcgccgcttgtgacgagcacgccgtcgtcctcggtgccgatgttgcgggaggacttcatgtacgccttaagatgccgtaaaagcggcgggtagccctccgttgtgctgtactggagcgccaaaatcggctcttcttccatcagctttgcggaaatggcggcaagctgtttagacgggaacgcttccggcgcagggttgccggcggaaagcgaaatatagctcgggtcagcggcgtatttaaagatttcacggattgccgagggctttaacgtgagcacgcggtctgaaaatttgtattccatcgtaacgtcacctttctatatgattcatttgattttgcactttcaggcttttacggataaaagtaaaacctcttgtcccaaactctaagggacaagaggtcaaattcctgcggtaccacccaaattggcgcataaacgcccgctttacagccgtagttacggcttggcttctaacgcggccaaacgtcgggcgattttcccgcccgccctcatggagccattcgccgcgcagcccgcaccccgtctcaccgaaaggggctctctttgccgttttgcatcgggtactatttccaatcatcggttttgatattaccgctattctaagcccttttttgcggtttgtcaagtcggcacagccggaaaactgtaaatttccacgtgggatgcaagagaaaccgacaaggaaaaagcgcatgaaaggcgcggcgacagaaaccttgtgcttttcacaaaacaatcctaaaacccgcctgcctgtttcgtgttttcctgcgggcaaggcttcgtataatggtagcacagaaaagacaaagtgcaggaaagggcggaaaagacaatggaggaaaaagcagttttaagagtgcgggaccgcataagcgcggcccttaccgtgccgtatgtgcgcagggcggtgtggctgatggcgggcggccttgcgggctttttaacggcgcgcgggctcgtcttcggcaaatacgcgccgtttgcggcggcaggcgcggcggcagcgccgttttcgaccatgtgggcggtcatcctcggcggcgcggtgggctacctgttcccgtcgcccgtggatatccccgcgcgctacatcgcggctctgctcgccgtgggggccatccgctggtcgctgtcggagttaaagtccatccgcgaccacccggtcttcgcaccggtcacggcatttttgccgctgctttcgacgggcatcgccatggtgtttttaaacggctcgctttcaaatgtgctcgccatgtacattgcggagtcgtttttggcggcgggcacggcgtattttctgcgccgcactgtgcagcttttggagacccaccgcgagaccgccgtgtttgatagcggcgacgtggcggctgttatcgtctcgctcggcgttttgctgctctcgttttcaaacgtgaccgtctcgcacatttccgtcgggcgcgtgctcatcgtgctgacggtactcgtctgcgcgcgcatcggcgggcttgcgggcggcgcggtggcgggcattgcggcgggcacggtgcaggggctctccacggcggggctttcgtatctctccggcgcgtacggcctcggcgggctgatggccggcgtgttctcgccactcggcaaattcgccgtggcggtggcgttcgtcatttcaaacggcatcgcatccttgcaggtgaacagcacttcgcaggtgttttacggcgcggtggaggtggccgcggcctccattttatacatgcttttgccgcagagccgacggctttccaatttattcaccgcgcacggggacaggctgccaggcgattctcttagaaaaaacgttattttgcgcctgcggtatacggcggaagccatgcgcagcgcatcggattccgtagatcgcatctcggaaaagctggagacgaccgcggcggctgacctgccgcatgtgtacggccgcgcggcagagaaggtttgcaccgggtgcagccaatgcgcagtgtgctggcgcaaaaatcgcgacgagacgcaaaaaacgttctcgcggctttcgtatccgctgcgggagcgcggcaaaatcgaacgcagcgactttgatgtgccgtttttgacgcgctgcaaccgtgccatggagctgagagacgccgtaaacggcgaataccgcgagcttttggcaaaagaaagtgcccgtatgcgcgccgaacaggtgcgcgccatcgtcgaagaacatttccgctccacggcgcagatgctcggcgacatggcggaggaattcgagcagtaccagcgctttgatgaggacagtgcagagcaggtgcgcgaggtcttgcgccaccgcgagctcacgccgattgaagtctgctgccgcattgataaattcggccgcatggcgattgaagcaaacatttgccgcacacacggggtgcacatcaacaaagggcagctgacacgcgagatctccggcgcgtgcgggcgcacgttcacgcagccgagcgtgacggcggcgggcgataccttaaagctgcaaatgtgccagaagcccgtttatgccgtgcagcgcggctttgcgcagcacgcagcaaacggcgcgtctctctgcggcgattgcgccgaggcattcacggacggcagcgggcggtatatctcggttttaagcgacggcatgggcacggggggccgggcagctgtggacggcacaatgaccgcgggtatggcgcagtcgctcctcaaagccggtatcggatttgagagcacactgaagatgatcaactccgccatgctcgcaaagggcggggaggagtcgcttgcaacgctggatgttgcgtgcatcgacctctttacggggcacgtctccctgcgcaaggcgggtgctgcgggcacggtgctgcgcaggcgcaagaagacggagtatctggaagccaaaagcgtgcctgtgggcattctgccggaaatcgcctttgcccgcagcgaaaaagacctcgatgcgggcgatatgctcgtcatggtctcggacggcgtgacggcttccggcacggagtggctgtgcgacctcattgcaaactatgaggacgacgacccgcaggcgctttccgagcgcattgtggagcgcgccgtaaaagaccgcgcagatgggcacgaggacgacgtaagcgccgtggtgctccttatcgaatgacgtacaattcaaaagttctccctgaaatctgtgtaagattaccattgaatagcccagtagagtatggtgtacttatacaagtttatgagatataacgccttaatatttgagcaatttatgtaaaagaagggagaagcccatgaataaaagagcaagcggtgtacggatgcacgtttcctccttgcccggcgtgccgaacggcaactgggcgttccgcgtcacgcaggagcagctcgacggcatcgacaaaaagtggctcaaagaattaaacgacgtctattacagaagcaaataacagcaaaaggccggcgggtttccgtcggcttttgtcttgcaaattttcgatgtgctgatataatggggaagagaaaaatctcttagagaaaagttccttttgggaggaaaatagtatggtcgatatgaaaaaagcattgcagaacattgacgacgtgatcgaaaaggggccgtacaaagacacatgggcgtccctttcaagctggcagacgccgaagtggtatcaaaaggcgaagttcggcattttcatccactggggcgtgtacagcgtgccggcgtttgacagcgaatggtatccgcgcaacatgtacatagagggctccaaggtctacgagcaccatatcaaaacctacggtgcacacaaggatttcggctacaaagatttcattccgatgtttaaggcggaaaagtttgatccgaacgcatgggctgcgctttttaaaaaggcgggcacaaaatacgttgtgccggtggcggagcaccatgacgggttccagatgtaccgctcaaatatttcgcactggaacgcttacgagatgggaccgaagcgcgatatagtcggcgagctgaaagcggccgtggaagcgcagggtatgacgcttggggtatcctcgcaccgcattgagcactggttcttcatgagcaacggcaaaaagtttgagagcgatatgccgcaaaacccggaccgcgacgacctctattggccttccatgcccgacccggagaatttcgatgccatcgacggcaagccctctgaagaattcatggaagactggcttgtgcgcacgtgcgaactcatcgacaattatcacccgaaaattctctattttgactggtggattcagcaggaggcggcaaagccgtacctaaaaaaagcggcggcgtactattataatcgcgctgcggaatggggcgaggaggttgccatcgattataaattcgatgcgtacatgttcggcacggcggtgccggatattgagcgcgggcaaatggcggacatcaagccgtatttctggcagaccgataccgccattgcgctgaattcctggtgctacacggaaaacaacgacttccgcccggcgggggacatcatctgcgaccttgtggacatcgtcagcaaaaacggtgcgctgcttttaaacgtaggcccgaaagcggacggcaccatctccgatgaggacaccgcggtgctgactgccatcggcgactggatgcaggtgaacggcgaagcaatttatgacacgcacgtgtggaggacgttcggcgaaggccccacaaaggtgcaggacggcggcttctccgacggcgtgaaaaagaactttacgggcgaggatttccgctttacggcaaagggagatacgctctttgccatcgcgctgaaggcgaacgacaacggcgaataccacattcactccctgcgtatgcaggagcacaccgccggtacggtgtaccacggtttagtcgagagcgtttcggtgctcggcacagacgatgcacccgcgtggacgcgtgacgaaagcggcctgcatatcaagacgaactacacgtccgataagccgatcacattcaagattaaattaaactaaaatcacaaaacaaaaagcagagtgttcggattgagcactctgctttcgttattttatgcagttattcggagatatactcgcgtacacggaacttggcgccggcgttttcgcacagcttgcggcaggcttcaatgtcctctgcgggcatggtgctgacgaccgtcatcaccacatgcggcacgttttttacggcttctgccgtaaaatgcagcatggcatcaaacgcctcggggccgtatttcgagtggcataccgcatcgtacttttcggcggtcggcgcgtttaagctgacggacacaatgtccaaaagcccgtgcatttccggcgcagcgttgcgcccggtgatgcagtccgcaaggccgtttgtgttgacgcgcagggtgtaattgcccatttcttttaagcgcgcggcaagccaaagcatgtcgtcccagcggcaggcaggctcgccgtagccgcagaagacaatctccgcgtatgaattgaggtcgcgttttttaaggtcggctaagatttcctcttttgtcggctccgcgccctcgtaccagaggttatccgcgtacaggctgcccgtgctgttgttgcgcaggcagaagtcgcatgcgttcgggcactggttcgtgacgttgatgtaaaggttatcgccgtattcatacgtgatggtcaagatgatcgctccttttattttgcggcgctcggcagcgtgataccgaaaaggcggcaggcgttttcgcaggcggtttccaaaacctcctgcgccgtgatgccgcgcacttcggcaatcttcgccgcgtcgtaggggatcatggagctgtcgcagcgcttgccgcggaatggcacgggcgccatgtagggcgcgtccgtttcggtcaaaaggcggtcgagcgggatggtctttgccacatctacgctgtggcgcgcgtttttaaacgtcacaacaccgccaaggccgatgtacatgccgagttttacggtctcctgtgctaattccgcactgccggaaaagcagtgcacgacgcccttcggcttgtatttccgcagaatgtccatcatatcgccgtgggcctcgcggtcgtggatgacaacgggcaggtcgtgttttttcgcgagctccagctgggcgataagcacctctttctgcttttcgcgcgggcactcgtcctcccagtggtagtcgaggccgatctcgccgacggcgacgatcttcgggtgggaaagcagcgcttccacgtccgaaagccagttatcgggcaggtcgtttgcgcactccgggtggatgccgactgcaccgtagatataatcgtatttttcacagagcgccacggtttttttgaggctttcataatcggctgccatattgatgaccgaaacgacgcccttttgcggcagtacggagccgagcagctcgtcacggtcgatgtcgaactgctcgctgtcgtaatgtgcgtgggaatcaaatatcatagagattttccttagcgaattttggagcctgccggggtgccgtccacaaatacgacgcgcacatcgtcctcgcctgcgtctgccgcaaggatcatgccctggcttttcacgccgcagagcacggcgggcttcaggttcgcgacgacgatgacggtgtgaccgatgaggtcttccggcttataccacttcgcgatgccggacgcgaccgtgcggggtgtggaggtgccgtcgtcgagcgtgagcttcaagagcttctttgcacgcttgatcggctcgcaggcaacgacctttgcggcgcgcagctcaacctttgcaaagtcttcaatattgatctgggcaagaccctcaatttccttcttcggctcttccttcggagcgtacttcgcttccacagcggcaatcttctcgcccatctccttcggatcgatacgggcgaagagaatctccggcttgtctgttactttacccccattcgggtaaacgccgaacgtatcgagcgtatcgtatgcgcgcaaggtcgtgccaagctgtgcgacgatcttctctgcggtgtccggcataaacggcatgaggagcgccgcgccgatcgtgatgctttccacaagattatagagaacggtggaaagtctgtcggctttcgcttcgtcctttgcaagcgcccacggcatcgtttcgtcaatgtacttattgcagcgcttgaagagcgtgaagatttcggaaatggcatctgccacgcgcagctgatccattttcgtctgcacgctgttctttgtggcgagcacaacgctctttaaatcgttatcgacatcttctacgacgtttttgttctctacaacgccgccgaagtacttgtttgtcatggaaatggtgcggtttacaaggttgccgagcgtgtttgcaaggtcggagttcgtgcgttcgatcatcagatcccacgtgatggtgccgtcggattcaaacggcatctcgtgcaggacgaaatagcgcaccgcgtctacgccgaagaggtctacaagatcttctgcgtaaatgacgttgcccttcgatttgctcattttgccgccgttcatcagaagccacgggtgaccgaacacctgcttcggcagcggcaggtcgagcgccatgaggaaaatcggccagtagatggtgtggaagcggatgatgtccttgccgatgaggtgcaggtctgccggccaatcacgcttgaactgctcggtggagttgccgtcgcagtcgtaaccgatgccggtgatgtagtttgtgagcgcgtcgagccaaacatatacgacgtgcttgtcgtcaaaatcgaccggaatgccccacttgaaggaggttctggaaacgcagagatcctgcaggccgggcaggaggaagttgttcatcatttccgttttgcgctgcggcggctgaatgaactccgggtgcttattgatatagtcgatgaggcggtctgcatacttgctcatcttgaagaagtatgcctcttccttcgcgggcttgacctcgccgccgcagtccgggcacttgccgtcgacaagctgggactcggtgaagaaggactcacacggcgtgcagtacatgccctcgtagtggcccttataaatatcgccctgctcgtagagctttttaaagatcttttgtacctgcttttcgtggtaatcgtccgtggtgcggatgaatttatcgtaggaggtgttcatcacgtcccagttcgccttgacaatcttcgcgacgttgtcgacatattccttcggggtgatgccggcggcattggccttttcttcaatcttctggccgtgctcgtccgtgccggtctggaagtagacatcgtagccctccatgcgcttatagcgcgcaatgctgtcggcgagcacgatctcatacgtgttgccgatgtgcgggcggctggaggtgtaggcgatagccgtcgaaatataatacttcggtttactcatgggtggatcattcctttacaatgtattttcaagaggattgatttttcaacggttgaatgtattcacggttgaatttatttaactgaatagtacggcggaaagtgccgagaggatcatcagcccggccaaaatcgccgcgccgatgcgaacgatgagcttgcgttgcttttcggttttcatagaaagctcctttcgcgggtgcagggcatgcctgtacgtgtaccctttattttaccattctttttttcacctgtaaaccgctaattgactttattttccgccgcggttacaataaaagcggaaatacttttgaaatgagggaaaaacccgatgcagtttttaaatacagaagaaaaaccgcgccgcgcggcggtcatcaacgatctttccggtgcggggaaatgctcgcttacggtgatgctgccggtgctgtccgccttggggtgtgagacatccgtgttgccgacggcggtgctttccacacacggcggctttaaagatcccgtgtaccgcgatttgacggacgatatgctgaaaacggcacagcactggaagcgcgagggggccgagtttgagggcatctgctccgggtacctcagcagccgcgagcagattgacactgtgcgggaaatcttcgagctgtttacggacgaacacagccgtccgctgcgccttgtagaccccgtgatgggtgacaacggcacgctgtacggcatttttaataaagaaacggcgcagagcatgacgaggctttgcgaaaaagcggacattttaacgccgaacatgacagaggcgtattgccttttgcacgagccgtttaaggacgggccgtatgacgaaaaggagcttaaaagagtaatgaaagccctttccgactttgggccgaagaccgtcattctgacgggtgcgtatacggacggggagaaaatcggcgcggcgtgctacgatagggaaaaagacgagacggcgttggtgctttccgaccgcgtgccgggaaaataccacggcacgggggatattttcgcggccgtgatgctgggggcgatgttaaacggcaaaacggtaaaggaagcctgcgccgccgctgtgcggtacaccgcaaagtgcatagaagaaacgagaaaagcgtgcggtgacaacaccatttggggcgtgaaattcgagaaatgtctgccgtttttgatgcacgatgtgctcacggagaacgacaaataaagtctttggccaagttttcttcagaaaacttgcgggttcttagggcagcgccctaagtcgctttccgcagaaatcgaaatcttattgcctaacaaaaaactaagaatggtagaaagcaatgctttgcattgcttgaacagtcccccggactgtttagccgtaggaaacccggttgcatagattccctgaaagggcggctcaaagccgccctttttatatagctgtgagcatgcgttgatgcgcgttatctcttctttttcctcaatcagagggagcctgaaatgaaataaaaaccgccggacatcgcaggacatcagaggacattgcaggacatcggaggacatgaatttgaaaagtttcccttttgagggaaacttttctgcgttttgggggtatgggtgaagagacaaacaggcgggcgaaaaaacgaacggcgtttggcgcttcaaaactttcagagaggatgtggaacatggtgaacgaaacggcgaaggagggctttcgcagattggcgttcggcggtattcacgatgccgtaaggctgctcttttgcgaggacgtgaacccgcgcacgctgaaaaacatggatctgttcgccgtctccgaaattcgcagaccgaaaaacggcggcatggaaattcggtttttcgaccggatcgaagcgctgcggctcctcagcgagctcgagacgagcgggacgggtgcacaggcgctgctctccgccattgaaagcggtgcggcggcgctgaaagacggggataagccgtgacgccgttttccgaaaagcagatgcaggtcttgtgctggtggggcgaaaaaagcccgcaccgggataagcttgccgtcatctgcgacggcgcggtgcgcagcggcaaaaccacctgtatggggatatccttttttctgtgggcgatggcacgctttcaaaatacgagctttgcggtgtgcggcaaaacgatccgttctgtgcggagaaatgtggtcgcggagcttataccaaagctaaagtctatgggcttttccatgcgcgtgcggcaggcagagaacgagatcatcctatcgtatcagggcagagaaaaccgtttttaccttttcggaggacgagatgaatcgagcgcggcgctcattcagggcatgacgctcggcggcgttttgtttgacgaggtggcgctaatgccgcgttcttttgtggagcagggcattgcgcgctgttcgctgaaaaacgcgaagctgtggttcaactgcaacccggagcacccgcagcattggttttaccgcgagtggattttgaaagccgagagccgaaacgcgctttacctgcactttacgatggaggacaacccgtcgctcagtgaagatgtgcgaaagcgctaccgaacgatgttttcgggcgcgttttacagccggtttattgagggcaagtggacggcggcgacgggactgatttacccgtttgcgcttgacctcctgtgcgaagtgccgaaagcggactttgagcggtacgcggtgtccatcgattacggcacggtaaacccgacctccatgggcctttgggggcttttgtgcggcgtgtggtaccgcgcagacgagtattactttgacgcgcggcttgaaaacacgcggcgcacggacgaggagcactttaaggggtttttggagctcattcgcggcagaacgcccgatgtgattgtatgcgacccctcggcggcgagctttatcacacttttgcagagccgtggttttgcagtgacggcggcgaaaaacgacgttttaaacggcatccgcatgacggcaacggcgctgcgcacggggcagatcaaggtgacaaagggctgcgtggacgcggtgcgggagttttccctctaccgctgggcagacgacggcgcgcgggatgtgcctgtgaaggagaatgaccatgccatggacgacatccgctattttgtctccacggtgctcggcgcgggcgaaagctttgcctgcgcggtgcaaagggagacggggaaaggagttagcatttgggatttttgaaaaaggagaagcgcacagccgtttcggtgcagacgcagggcgggtacccgccggtgctgccggtgacggcaggcgagcgtgcactgtaccgtgccttgcgcgagcaggtgccgatcatcgacgcggcaatttacaagctggtgcgtcttatcggcgggtttgaggtgtattgccccgaaaagcacacggaaaacgcgctgcgcgggtttttaaaaaccgtgcccgtaaacggctgcaacatgggcatcgataactttttatcggcctattttgagcagcttttaacgtatggcaatgcgattggggagatcgtactcgcaaacggggaaattcgggcgctgtataatgcgtcgctcgaagacctcgagattcggctcatctcgccgcttgaaacgggcgtgttcgtcgtaagggacgggcgtgcggagccgtgccgctacccggagctcattttgacttcggcgttaaacccgatgccgggcagcgcgatgggaagctccattttaaagggcctgccgtttgtgagcgaggtgcttttgaaaatttaccgcaccgtcggcatcaactgggagcgtatgggcaatgtgcgctttgcggtgacgtgcaaaaacgagggctacatgaacgcgggtgaccgcgcggggcagcttgcaaaggagtggagccgtgcgatgcacggccccggcgtgagcgactttgtggcggtgggcgacgtgcagattaaagctatcggcgcggacgggcagcagatggacagcgaagtgcccgtgcggcagatgctggagcagattgtggcgaagatgggcattccgccgtttttgctggggctttcgtggtcctcgacggagcgcatgtcgagccaacaggcagacatgctgacgagcgagctgacggcgtaccgcagaattttggagccggcggttttgaagatctgcaaaacgtggctgcggctaaatggtcttgacgacacggtggaaatcgattggaacgagatcacgatgcaggacgaagtcgatcacgcgaacgcggcgtatctcatggcgaagacggagcagcttttaaaggagggggaagcttgagcgaaacggtaacggcggtacagccggataaagcggcgatggagaagatcaacctttacacgcgccgcgcctataagccggaggaggtgtatacgttttcggtcgttttgtgcgacaacgaggtggatagagacggtgagtgctttacgaaagagacactcgaggagcttgcgaagctgtttgtcggcaagacgggcattttagaccacgagccgacgagcaaaaatcagacggcgcgcgtgtttgacgctgcggtgaaggaaattcccggaaaggtaacatttttaaacgagccgtatgcgcagctcacagcacaggcgtatgtgccgcgaaacgacgggacgaaggcgtttattgaatccattgaaagcggcatacgcaaggaagtcagcgtggggtgcgcagtgaaaaagcgcgtgtgctccgtgtgcggcgcggaaagctgcgtgcacgtgccggggaaaacgtacaacggcaagcgctgtgtgcgtattttaagcggcgcggcggacgcgtatgaattctcattcgtggcagtgcctgcacagcgcgcggcgggcgtggtgaagaaattttcgccgcgctttgaagaatcggagaagaaaaaggaggtcaaaacggtgtacgacattgtaaaaaagctcgcggacggcgaagacagcgtgacagtggcgaaggaggagctcaacatgctcaaaacggagttgaaagcgcttttcgaccgcgcggagtgcggcgaccgctaccgtgcggcgctgtgcgaacgcatctataagctgagcgccgtggcgcagccggagtttaaacgcggactgacggaggcgatcacaaagtcgctcggcattgcagaactggaagaaatggcggcggcgctcgcaaaggcggcggagcgcaaaatgcccgtaatgccgcagctggcagcggaaaagacggaagacacgaacgcggcagacgacggcgcgttccgcatttaagaaaggggattatacaatggcatttgaaaacattacactcgaaaaaggcatgtacggcgtgccgggcaagaattttacacaggttttggaggagctggacggctcccagaactacgcgggcacaccgtttgcggggcttgacgcataccagagacagcttaaacgcttcggcattcgtgtgagcggtgcgaactgcgacaccgtggagaagtttttcacctcctcccagagcgcagcgctgttcccggaatacgtcgcccgcgcagtgcgccagggcatggagatggcgtcttccctgccggacatcgcggcgaccgtgacgaagattgacacgctcgattaccgcaccgtgcagacggcgacggcttctgaccagaagatcgaagaccccgtagcggagggcgcggccattccggagacagtcatcaagacggcgggctcgcttgtgacgctgcataagcgcggcagactgattgtcagctcctacgaagcgctgcgccaccacaggctggacctctttacggtcattctgcgccagatcggtgcgtacattgcgcgcagacagatgaaggacgcagtggacgtgctgttgaacggcgacggcacgaatacgggcatcaccgtgacggcgcttaccgctgcgccgacctacaacgaccttgtgacgctgtggggcaagctttccgactataacttcaatacgatcctggccggaacgactgctttgcaggcgctccttaagatcacggagtttaaggacgcgcaggcgagcctcaacattaagggtgcgggcaagctcatcacgccgcttggcgcgacactcatccatgtgccgtccatggacgcgaagaagatcattgcgctcgacaagaactgtgcgcttgagatggtgcaggcgggcgatgtgctgaccgactacgacaagctcatcgaccgccagatggagcgcgcggccgtgagcgctgtggcgggctttgcacagatctacggcggcgccgcacagggccttagctactgattttattcgattctggcaagccgtaccgctttggtacggctttgccgaataaaaaggagaggcaaatggagatacgaaacgtgctggaacggctgaagcttttgacaaatgacgaccgcgaagacctgcttttgatgctgagcggcgatgcggtgcagcggctgaaagcgcgcctttgctgcactgaggaggaagaaaacgcgcatgaggaggcgctgtgcgcagcggctgcggcgcaggcggcgtatcagttttggcttttggaggaagcggcatcgccgaaaagcctgacggcgggcgaggtgcgtgcggaatttgacaaaggcagcgaaagggcgctcgcctatacaaagcagtgcgagcgggcggtgtccgggcttttgcgtgacgaggatttttacttcggcgtggcggaggacacagtgtgaggaatgtatttttgagggcgcagcagatgacggcggagataagcggcgagaaggtcgtttgccacggcgttgtgcatcgcctgaaggaagacaaaacggccttgcaggcggaaacggagacgttcggcggggcgatgaagacgctgtatgtctacttcggcgacggcaaagtgctttgcggcgcggagaacgcgaggctgactgtgggcggcgagacgttccgcgttttatatgccgaggaaaaaagcgggatttgcggggcgctttacgtgcgcgcggtgctggaaaaggaggaaaaagatgacgggaacggagcttagtgcggcgcttgcggaaaagctgaaagtgcttttgccggactgcgcggtgcgcccggcgtttacgggcacgctgcaaaggcttccgcagcgtgccgcggtgacggtgggcgtgatgcaggaggaaaacgcgaacggtgtgtttgaaacggtgctcggcgtgcagctgtatgcgcgcgaaagggacgaccacgcgcggctgtttgacgcggtgtgtgcggcggtatcgtctttgccgtgtgcgctgcgcagtgtgaagcggagcgagacaacgtactcggcggcgctcagttgccttgtgacgctttgcacggtgcaggcggcgacaggtgcggcggataaagcacgcgcggcggtgatgatcggtgacaaggtatttacggcggacgcggtgaaggtttcgcacgaagcgaaggtcaagcgctattacgccatcggcgaggaaaatccgtatgcggcggtggcgggcaaagcggtgtacacggtcgtactgcacgggttttcgggcggcgaggaggcgctccccggcgaattcacactgcaaacaggcggcgcgcggtacacgcactgcgttttgaaagcggcgagcgaaaataagcttgtgatagaagcgggtgcgtgtgaaaaaatgacacagagaacacaaagcggagcggaggcataaggtggaagaagaatacaaaaacgcacaggcgctctccggcattttggagcgcgaggagcagcgatatcccgtgctgcttcgtgcggacaggaggtttgcatgaacctgatgacaatgcagtttggcagctttgtgtttccggtgaacccgacggaattaaaactcgagcgggcgtgcctgctgcgtgagacggtgggtgttgacggcgaagaatgtgtggaggcggtcggcaagcgcaaggcgcgcgtagcaggcaaggggcacttcaccggggagaatgcgatggcggtttaccgcgagttagaggcgcttttcggtgaaacagatacgctgtacttgccggggcacaggccgtttgaggcggttttgagcgagcttgcgctcatcggcgtgccggagaaaaacacggtgccgtacacgttcgcctttgtggagacggcggggaaaagcgaagcggtctccggccggacataccgcgcgaaggcgggcgagagcctgtgggattacgcgtattttacgggcgtttcgattgaccgcttggcggagaataaccggcatatcgcgtgtattgcggcgctgaaagacggcgaggaggtgcatgttccgtgacggatttttcgcttgagtttgtgtttgcaagcggtgaaaaacattcgccgaaagcggagccgagcgaatggcttttaagaagcgacgcggatacggtagcggacagtttgacggtgcggtttagtgcgggaaagcggctttttacggaagagcccgtgggggcggtgcttaaaaaggacggtgcggtgatctttgacggtatcgtggacgaacaccgcgtgaaatgccagaacggcgcgcgcacggaggtcttctccctgcgcagccgcgcggcgcttttgctcgacaacgaggcggcaccgatggagcttagattgccctcgctgcggcttttggagcggatgtatctgatgccgctggggctgcacgccgtgggcggcgacaggcggccggtggagggcgttttgaccgtagaaaagggcgtgagctgttttgaagcgctgcaaacgttctctgagagatatctgaactgtacgccgtatacggacaaaagcggcggtgtgcactttgaaagctacgtgccgaaaacggtgaagcccgattgggtgacggcgcgggaggtgattttttgcccgtacaaaatgctgagcggcgttacggtgcaaaacgcgcagacgggcgcatacagcgcggaatatcacgatcctttggccccacaggtgcgcgtgcggtatctttctgcctatgcgaaaacagcaccgacggcgcttttaaatgaaagccgcagggcggcaaagcgattaaagctgacgtgtgcttcttatatagacgggaacatgggggacacgatgcggacggaggagcttggcgaggtgcggctcatctccaaaaacgttttgctgcgtgggaaagacgtgaagaccgagctgcattttgaaccggtttaaaggaggcatgaacatgtggctgacgaaaaaggagacggcggaaaaggccgaaagcgtgaaaacgggcgttgtgacgacgggcggcggggagatttccgtctgcacggagctggagcgccgtgcaccgactgtaacggtgccgtacggcatggcggtgagcgtgccgcagggtacggaggctgtgatgaccggcggtgtgtgccttggcgttgtgaacgacgcgggaacgcttttgcccggcgaggtgcggctgttctcagcgggcggtgcagagatcgttttgaagctcgacggcacggtcgtcatcaatgggcaggtgtttgagaaaaaggaggaatagcgtggaggtcgtgattttaaacggcataacgcagacggcggcgacagggctgccgaagacggccgaggggcttaacgcgcttatgcagcgcgcgtataaccgcatttgcctaaaacgcggcgcgttttgctatgaccgcgtgctcggcagccggttttatatgctggatgcagcggacgagcacgccgaggagcgggcactgcggtatgcgcaggcggcgctgttacccttagccggtgttgaggcggtctccgtgcggcgcgagggggagcggtttatcttcggactccagacgatgctcggcacgggggagattgcggtgaaaggggcgaaaatgtgaaatttgaggaaatttatgcgcacatggcgaaggaatacaaaacgctggcgggcgtggagcccgaggacgcggcggacgtttcgatccgtctgaaggtactggcgggcgagctgtatacggtgctgtgcgcggcggaatcgctgaagctgaattgctttccgcagacggcggcgggcgaggcgcttgacctgcacgccgaagagcgcgggcttgtgcgcaaggacgcggtgaaatctgtgggcacgctgacgttttcgcgccgaacggcgctgagctacgcggcggagatccccgcgggcacggtgtgtgcggcaagcggcgaaaacgcggtggaatatgagacgacggaggcggctgtgctgcccgcaggcgcactgacggtgacagcggcggcgcaggcggttttgggcggcaggcgcggcaacgcggcaaagggtgcggtgaacacgctcatcacgccgccagcgggcattgaaagcgtgacgaacgatgtgccgtttacgggcggcgcggataaagaggacgacgaagcgctgcgcacgcgccttttgcggtgcttttacgcactgccgaacggctcgaacacggagacgtaccgccgtgcggcgctgatgacaccgggcgtgaaaagcgttcaggtggtgccgcgcgcaaacggtgtgaacacggtggcggtgtacctgtacggcgacaacggcgcggtggcggacgaggtgctcggaaaagtcggagagacgctcgaaaagctcaaggagatcagtgtggacgtgacggtggctgcagcggtggctgtgaaaaagccggtgacagtttacgtgaagccgaaggacgggtgcgcgtttgaagatgcgaaagcatcgtgcacggcggcaatcacggcgtacctgaatgcgtttgaggtgggcgagccgtttgtgacggcggggctgatccatgcggtgatggagacgggcgtagcacaaaactgcacggtgccggcgagcgtggcggactttacgccgaacgccggggagatcgtcacggcgggcgctgtaaatgtgctggagacgcagtaaggagggcaaatgacggaactggaaacccgtatgcgcgcgatgctcgaaaaaacggggctgtattttggcgaagacaagtggctttcggcagagcttgcggcgtatgcaaaggggcttgaactcgtgtatgatacgctttctcatgtgcggcgcgacgcgtttgtgcagacggcggaggaggacgggctgaaagcgtttgaatcgctgttccgcgtggtgccatccgtggacagcacgaaaaaccggcgcgcgatgctgctgacccgcggcgcggtgactcccgcagaccacacagtggaagcgatgcaaaagcagcttttggcagcaggcatcaacggcaagctcgtcccgcaaaagggcggcgtgctgaacataaatgtgctctctaccatgggcatttccgaagcggcggcggaaagcgaagcgcgcgcgtttttgcctgcgcacctcagtttggtgttcgatttcggcaaaaacacgtgggacgcacaggacgcggcggggagctcgtggaatgtgctcgaccttcgaaacaagacttggaacgcgctcgacgttttatgagcggaaaggagaaacatggcagcaagtaaaaaatcaacggttctcggcctttgcctttgggaggggacggacaagccgcgccgtgtggattttgtggcggacaacgaagccatagagtcgcagcttggcgggcacattcaaaacgataacctgcatttaaatgacacgcgcagaaagcgtttagatacgccgacggaggtgcgcacgtacacgggcacgggtgcggcctcgcgcacgatcttattcggcttcagtccgagtgcggtgatcgtttttgcggtggacaagccgttttcgcaggcgacgacgggctgcataaagcaatacgccggcatagcggcaggcggccagaacagccttggcgtgacgctttccacggcgcaggtgacggtgcgccagacccaaaccgccccgacggacggcagcggcatggcatcgctgaacgaaagcggcgtaacgtacgcggtgttggcgttcagataaggcgttatatcattctccgcgaggaaaatatcatatcgaacaaagagagatatatcattaaaaaagaagcgcgcagcttttggaggagctgcgcgcttcttggtgtattgcgtgtaattttcagggatttctaaaggcggtttttatgaatttgccgcgcaaattcagtgggagaccccctaattgggtctcccacgaacaaacagtccaccggactgtttgttctcccgtcctgatttttgggaggcaaaaggtgtttcgtcgtctgcggacgacgaccaaaggcgctgcctttggaattcgcaagttttctcgaagaaaacttgactaaagactttattcattcgcttgccgcaggcaagtgttagccttgcgtttcgcctttatcttcgagcagggtaacggtgacggtgaattctttgccgcctacgccgctctcgttcgggcggaacaggtggatctcggcggtatcgccgggcttataatttaaaagtgcgtttgcgagttcttcaagcgatttcgtttcggtatcatcgatggcggtgatgatgtcatacgcctgcacgtctgtgccgttaaagcagctgtcttcgtcgatctcgctgatcatgaagccctgcgggacgtcatacatggcggcctgcatctgggtgatggcggtgcctttgatgccgaagcggacgcggccttgcacataaccgcctgcaagcaggtcgtctatgatgctctttgcaccggtgatcgggatggcgaagcccatgccttcgtactgctcggagacgattttagcggaactgatgccgatgacctgaccgtgtaagttgacgagcgggccgccggaattgccgggattgatggcggcgtcggtttggatatacgtcatgccgttcgagctgtacgagccgacggaacggttgaggcccgagatgacgccgcgcgtgatggagccggagaactgctcgccgcccgggttgccgatggcgacgacccactggcccatgcgcaggtcatcgctgtcaccgaactcggcgggcatgtagcctgtgccgtcgattttgagcacggcgaggtcggtggttttatcgaacccgacgacgacggcgtcgtgaagttcaccgtcatacgttttgacctgcacggaaacagacttggaatttaaaatgacatggctgttcgtgatgatgtagccgtcttccgttgcgaaaattccggtgcctgtgccctgcgtttcgccgctctgcgtgatgacaagcacggtggacgggatgaccttatcgtacacggcatcgatatcgagctcggcggtattcggctctttatctaaggtgatgccctccgtattcggggtgacggcgatgtccggcggggtgaagctgtcgtccgtatcgggcgtttcgtcttcgccgggcgtttcgctgtcgctgccgtcgttttcatgcgggaagttcggaatgagcggatcgcccggcagcgttgtgacgccgtaaccgcggttcacggcggcgtagatgccgtaggaagcaaagccgatgacggagcctgcgacgaggacggacatgacgatgatgagaatacgcaacccgagcggcattttccttttttgcggcgcgggatgcggatatggattttgcatattctgcgggtacggcgggggataagcaccttgtccgtagggcggcgggtactgccccggctgcggctgggtgttgtagtttgcatagccatacggcgggtttccgtactgcggggcgtttggctgcgtgttgtacgggtagggctgatacggcggttgcgggggataatagccggtatgctgaacgggctgcggctgcggcggaatgttcacgttcgggatgggctgggcttccggtgcctgctcggcattcgggagcggctctgccgtgggggcatcggaaacggttggctccggggtgacagtcggttctgcgggagcggccggttcatcagaaacggtgggctctgcgggagcggtctccgcggtttccggtgtttcgggaatattgtcttcggaagaagcaggcttctgcatttccggggttttgttttcaaaatcgtccatggtgtgatacctcacttttggatttatttctgatcgggctctttattatccttgtggccgtggtgctcctttttggggcgctccgagatgacagcatcttcgaccggcacggtgaccgggatggagccggtattgtacttcaacttcgggggttcctgcggcttcggaatatagaacgagaagcgggtgtactcgttcacgacggaggagacggaaatgtcgccgccgtggagcttgatgatggtgcggacaaggtacaggccgagacccataccgtttttatcctgacttctcgatttgtcggtcttataaaacttctcgaacacgagggggagctcatcggactggatgccggagccgctgttttcgatggtgacgacgatgcggtcgatgctgtccgagacgttgaaggagatgtagccctcggtgtttgtgaacttgacggcgttttcgacaaggttatagacgacctgatgcaaaaggtcttcatcgccgtgcacctgcatgggctgcaaggtatcgagcccgcggatgtcgatctttttctcgtcgatgctcttttcaaacgtgagcacggtggagaggacggtctcggaaatatcgaaatcgtttgggcggagcttcagctcgccgttatcgatgcgggagagatttaacatagtgcggacaagacgcgagaggcgcttgacctcgtcggagacgatgtgcaggtaatgcgactggcgctccggcggaatggtgccgtccagaatgccgtcgatgaaacccgcgatggttgtcatcggggtctttaactcgtgcgagacgttcgcgacgaagctgcggttcatactttcgctgccggagagcgaatctgccatgttgttgaacgcggtggcaagctggccaatctcatcgttgcttgtgacgggcacacggatggagaaatcgccgtcaccgaagcttttggctgcggcggacatctgccgcaggggcttgacgagccggtaggagaagaggccgacgacaacgaacgccagaatgaacgcggcggctgcggcgatgaggaacatttgtagtgcggcgaactgatactccgtgagggaggcagcgttcatggcagcaaaaacggcaccgacgggcactctggcgctgttttcgcctcctgcctcggaagatgatgtttcggcgacggaataaagcggcacgccgacgacgtagtacggggtatcgtaaatgccgtttttgcgtccgtcgccggtataggagccctcggacgcgcactttacgatgtcggccgaaatcttcgtctgcggggtgaagtttgcgccgatatttgaggtgctgttggcataggcaccgaacaggacgttgccctcgagatcggtgacgaaaatatcggcatcgatattgagagagaacgtgcgcacaaagactttcagaagctccggtgcaccgttattcgtgatgtctacgacggaagtaatggacgccatggacgaggcgttttgcataagcagtttgcgcttatcgcttttggtgtactgcgagaacacaaacatcatgacgctgccgagcacgatgaagctggcgagcacgatgaccatggtgacgcgcaggtattttccgaacagggatttttgcaaggggaatccttcctttcgccggcttattctttcacttcaaacttatagccgacgccccagacggttttaagcgaccatttatcggaaacgccttcgagtttttcacgcaggcgcttaacgtgcacgtctacggtgcgggaatcgccgtaataatcaaagccccacacttcgtcgaggagctggtcacgcgtgaagacgcggttcgggttcgaggcgagatgatagatgagctccatttccttcggcggagtgtcaatctggacgcccttgaccttgagttcgtaatttgtgaggttgatggagagattctcgtagtgaacttctttcacctgagaggattcttttttgccaatgcggcggaggacggcgttgatgcgcgcgatgacctcttttgtctcgaagggctttacgacgtaatcgtccgcgccgagctctaagccgaggactttatcgaacacttcgcccttggccgtcaacataataatggggcactgggactttttgcggatctcgcggcaaacctgccagccgtcgagctccgggagcatgatgtcgagcagcatgaggtccgggttgacggaatcaaacatttgcacggctgccttgccgtcgtttgcaatggctgtttcaaagccttccttttcaatatacaatcttaaaagctcacagatatttctatcgtcgtctacgatcatgattttgccggatgccataaatttctaccttccttatttcaataattgcggggcgaaaagcgaccccgtttcctcccggaaatcccctgtttgtgcagagtatgaccagtttgtatttattgtaccgatttattgcgtcgaatgcaagaacaaaaggtgaatattctgtgacgatagggcttgttttggggcgcggaattggtgaaaatgcgcgtttttatgcgaagtgttgcggcggaaaataaagtgtgttatactgtatcagttcgattttagactgttgaacaggataacggtcggacaaaatgaaaactaaaggctttaaacagcgtacttcgccgtgcttgcggcgaagtcttttcatgcgaaaaaaccgcgtttggagcgtagagatttgcaaaagaatttacaaaaaagaaaggaagtttgattttatggcggaaaaaacggtaaagcttgaggacccggcaaacaaccgcatgggctctgcgaagatgctgccgctgattttgacgatggcgctgccggcaatgttctcgatgctgattcaggcgctttacaacattgtggacagctattttgtggcgcaggtgagccagaacgcactgacggcggtctcgctggcgttcccgattcagaacctgttggtggcattcggcgtgggcaccggcgtgggcgtgagctcactcatttcccgcagactcggcgagcgcgaccaggaggcggcggacaacgcggcgacgcacggcattattctttccgcgatcacgtatgtggtctttgcgattttcggtgcgattgtggcgcgtccgtttacggcgctttacacgcaggacgcggaagtgctcagcatgggcacgacgtacatcacgattgtgacggtagcatcgttcggcttcttctttgcggcggtcattgaaaaaatgttacaggcgacgggcaacatggtgatgccgatgatcattcagcttgtgggcgcggtggcaaacatcatctttgacccgatcctcattttcaacttcaacatgggcgtagccggtgcggcgtatgcgacggttggcggccagatcctttcgatgattgtgggcctttgcattttgtttttcggcaaccacgcgattgcgctggaatttaagggcttccgtttccacggcaagacgatgaaggacatttacgttgtgggtctgccgagcatcgtgatgaacgccatcggcacgctgatgaccatggcaatgaacggcattttggcaggattttccgcagtggccgtgaatgtgttcggtgtttactttaaattgcagtcctttgtgtttatgccggtgttcggcttgacgcaggggctcatgccgattatgggctacaactacggtgcgcgcgacaagaagcgtgtgacgggtgcggtgaagatcggctgcgtgattgcgcttattattgagattgcgggtcttatcgtgtttgaaatctgcccgggcacgctgatttccatcttcaacgcgacgccggagctgcacgagatcggcgactcggcgcttagaatcatcgcgatccacttcccgatggcggcgatcggcattacgctttcgacgctgtttcaggcgacgggccacggcatgtacagccttgtgcagtctgtgatgcgtcagctggttgtgctggtgccggcggcgtggctgctctcgaaaatcagcctcggcgctgtgtggttctgcttcccaatctccgaacttatttcgctcattgtgacggttgtattctttgtaattctctacaacaaggaaattaagaacctcgataagccggtgaacggtgcggcggcgacggagtcggtgaaggggtaagtgagctgaaatagagcgggcaaataaagttttcgacgacctttttcaaaaggtcgtcgattccaaaggcaaggcctttggtcgagctccgcagagctcgaaatacttttgacaaacgcaagatcaggaaaatagaagaaccgtccgggggacggttcttcgtaagaaaccctatcaagggggttcttgaagggcggctttgtgccgccctttttatatatgctgtggtttacgttagataaagaaccagctggggagccattctaaagcgttggcgtagttctgcgtggtgagggtgccggtgagcacggggtagaacgcgatgaacataagaatgtgcacgaggacgcaggcaagcaggagaattctaccgattgtgagcgtaacggcgccttttgtgaagatgacgcggcacagggaagctgtttcttcaaggcgctgatacgcgatgaggagcgcgatgagaataaacggcacggcagtgaaatagtggtaaatgaacgtgcagcgcggcacgagtacccacggcagatacgcggacaagaagccgatgacacagatgagcgcggtgcgggagtgccgttttacggcccttacgaacgcgtacacggtggcgggcacgcacgcccagaagaacagcgggttgccgagcaccgaaatggtgcggatgtgaccctcgctgtcagcgctgtaattgccgtagtaccacacgttgcggatgtcgaacggccactgataccacggggactcaaacggatgggtcgcctgcagcgtggagtggtaattatacatatgcgtttggtacgcgatgaaccggccgaaaacatcgtagcggttatgcggcaatgtggtgagcggcaggaacgccgtaaagtagatgccgaacggaatggcgatgaacagcaggcagcaccagaggcagagctttatggatttattaaggagcactttctgcacggcggcgtggcctttctcttcgcggtaagagacgatgagcttaccgaagaacagcacggcgaggccgactgcgccataggcgaccgtccacttgcttgcgatgccgagccccatgaagatgccgcttaaaaacagcgggggcaggagctttttgaagctgtcggtttttaaatcgcgctgaataaacacgagcatggcgtcgtacattaaaatgatgaagaacacggcgtaggtatcgatggtcgcgatgcgtgtttggacgtagtgcatgaaatcgaacgcaaagaggacggtaccggcggtgcagaggaacgtggagccaaagaggcgctttaagaaatggtagagcgcagggagcatcagaacaccgaacagcgtgcccatgaagcgccagccgaacgggttcatgccgaagatgcgaatgccgaccgagatgatgagcttgccgagcgtggggtgcgtgttttcgtatggctcgagtcccaaaatgtgctcgtaggcggtgcgggcgtggtagatttcgtcgaaataggtggagttcgtgtagcttggatagagcgggacggtgttttgctcatccgtgagctgccacgcgttgccggagacggcggtgagcgttgcaaagccggtgccgtctgtctttttgagtgcgaactcgttgatggcgaggtcgtcgcacatagacgtgatgcggatatatttgccggtgacggcgacgaagacgtttttccacgcatagacgctgccgtccgcgttttcggcggcggtcgtccagttggtttgatcgtttgaaacctcgatcttcatattggtgccgacgcgctggccgatgccgttatccgcgggggcgatgccgggcaggtagaaaatttcactgtacgcgtcgtcggtctcaaagacggcggattcgccgttttgaggcgtccatgtcgtattggcggtctcgtgatcaccgagattcgtgaacgcgacgatgccgtaaaggagggtaacgacggcgatgcagagaagatcgacacgcgtcaggcggacgttatgattcttgtcggtgatgagggagaattcgggcgctgcggcgggctttgtgtgctgttcggccgaggcggctttctgcgttttaaacgcagggagcgggcgcagggctttttcggaaataaagcagcggtacgtgatatagagcatataaatgtacaggagcacgtgcagcgcggagaggaacaggatttgaatggacgtgggggaaatgtaggcgttattgaggtacaacacataggcaacgttcaaaaaatgcaccgtggatgtgcccgcgaacaggagcaggaagcgcttttcctttgtgaaaacgtaggtgagcagcaggcacaggagcacggggaacagataacgctcgtgcattttgacgcagaaaatgtagaccgtgaacatcaaaacggtggggcaggcgaaaacggcgtcgtcgcgcttcgatttcagcagtaagaggcctgcgaggacggttgcgaacggcacgccgaattgcagccaagtgctgtgctccggcagggcagcccagttgagcccgaagagtgcccagacgttataggcgttgatggtgtagtaattataataatcgatggtgccggtgtagatttcgatgagcctcaggtaatcgaaattctttataaacggcgtggagaataggagaatcgtcgcaaaagcgatgatgggcccgaggacgaggtttttccagtcctttttgcggatgacccagaaaatgagcaccggcgcgaaaatgagcatctgcggcttacttaagatgccgaagccgtagacgaacgcggcgagcggcgtgtggttgtaccagagaagcagcagtgtgcagaggagcagaagcgcgcagaagctatcggcctgaccccagacggaggaattgacgatgacggcggggcagaaaagataggcaaacgcgataaggagtgcgcttttttcaccgagctttttgcgggcgagcacccaaagtgccgcggcgcaggcgatgtccgacaaaatgggcgcgagctttatcatgagcgtatagctctgcgcgtattggtcgacaccgaacaggcggcggaacgcctcaacgatgtagagcacatagagatagccggggggataatcgaggaagaagtcccggtaatacatgttattaaagccgtaatcgtgcgtataggcggcccacgctttaaagcaggagatgtcggcctcgaacccgttgatgttgtaacccagaataaagcgcaggataagccccaaagcgagcacggcgcagaagacgggcacggggggcaggccgaagaccgtagcttcctttatacgggcgcggcggacgggggcgccctccgtttccggcgcggcacgaaagccgagccacagcactgccgcaaggaacagggcggcgagcagaatttgtatcgtcatggtttttgttcctttctcaaaatttatttggttacgggcttgacccgcacctttttttcatgtaatcttgtagtagaggggatgcggaaaaatccccgtctgtgtacgctcattatagcataggttctaaatcgcttcaactgaattttggagtgtttcaacacacgcgtggaaaacgttttcacgcaggaaaggaacggtattgaaaatggaatttcagaaaatgcacgaaaatccggacgtgctgcacgtgggtacctgccagaaccgcagctacttcttgccgaaggcaccggaggacggggaagaatccacaagagtgtgtcttttgaacggcacatggtcgtttcggtattttgactcgtttttagacgtgttcccggagggctccgagggtgagatttgttttgacgaggaggatatggatgagattgaggtgccgtcctgctggcaaaatgcgggctatgaccgccaccagtacacgaacgtgcgctatccgttcccgtatgacccgccgtatgtgccggacgagaacccctgcggcctttatctgcgccgcttctgcatgaacgcggaagacctgacgcagaaaatttatttgaactttgagggcgtggactcctgcttctatctgtggatcaacgagcagtttgcagggtacagccaggtttcgcattcgacaagcgagtttgacatcaccgatttactgaacgagggtgaaaactccgtggcggtgctggttgtaaagtggtgtgacggctcgtacctggaagatcaggacaagctgcgcatgagcggtattttccgtgacgtgtacctcatccgcagacctttggcgcacatccgcgattactttgtaaagacgacggtgagcgatgacctttcccatgcggatatccgcgtggagatggactttatcgggctgccggacgtgacggcggagctgtatgacgccgagggcgctttgctcgaaagcacggcgggcgcggagccgaactttgcgctcgaaaacccgcacctttggaatgccgaggacccgtaccagtacacgatcgtgttccgcacggcggatgaagtgattgagcagaaggtgggcatctccaaaattgagatccgcgacagcgttctgtatttcaacaatgtgaaaatcaaattgcgcggcgtgaaccgccacgacagcgacccggtgacgggctacaccatcagccgcgagcaggcgaagcgcgacctgttcctgatgaagcagcacaacatcaacgcagtgcgcacaagccactacccgaatgcgccgtggttcttacagctttgcagcgaatacggcttctatgttattgccgaggcggacattgagggccacggtgcggcggcgcagaccggcggctacggcatggacgaatatgcggacaacgcactgaacccgattttcgacaaggcgattatggacagaattcagcgcagcgtcatccgcgacaagaataacgcgtgcgtgctgatgtggtcttacggcaatgagaccggctggggcccgagctttgagaaggccggcgcatgggtgcgcgaatatgacccgtcccgcttgacgcactacgagaacacgtattacgatgcgcgcggccacaagaacgacctgtcttccctgacgacggagagccgcatgtactcggcgccggagtggattgatgaatatatggccgacccgaagtacacgaagcccttggtgctttgcgagtacatccacgcgatgggtaacggccccggagatgcggagcagtaccagcagctgatcatgaagtatgaccgctttatgggcggctttgtttgggaatggtgcgaccacgccgtttacggcggcacgacgcccgacaaccgcgatattttccgctacggcggcgactttggcgaatatccgcacgacggcaacttctgcatggacggccttgtgtaccccgaccgcacaccgcatacgggtttactcgaatataaaaacgtcattcgcccggtacgcgcggcgcttgtgaaccgcgaaacgggggaaattcagctgacgaattaccgcgattttacgaacacggaagaatttttgacgctttcctgggaaattcagcaggacggcgatacggtggcctgcggcgtgatggacgacatcaagattgccccgcacgaaagcggtgtcattacgctgccggatgcaattccgacggagggcgacgtggcggtgcttctgcagtacagcgcgaagaagaatgacagcgtgttctttgagaagggacacccgctcggctttgaccagctgattgtttcccgcggggcacgcaaggaagaagcgcttagaaagggctttgttgttgcggaggaggacagccgcgccgtgacggtgacgggcgacagcttccgttatgtgttctcgaagaccgaaggcgtgtttacgtctatggtgaagaacaatatgaacatcatgacccgcccgatgacgtggaacgtgtggcgtgcaccgacggacaacgaccagtttgtgcgcaaggaatgggagcaggccggctacaacgaacctgcgataaaagtctatgcctgcaacgcgaaagaggaagacggcgttgttgtgatcgattgcaagctgagccttgcggcggtgtaccgcagaccgttcctgcaccttgactgccgctttacggtggacgccgagggcaaggtaagagcggagatcaacggtaagcgcgacatggagcgtccgttcctgccgagattcggccttagaatgttcctgccgaaatcgtttgacacggcggaatattacggctacggcccgtatgaatcgtactgcgacaagcaccatgcgtcttcgctgggtcactttgcgcagacggcggacgacctttttgaggactacgtgaagccgcaggagaacggcagccacttcggctgtgcgcgggtgacgattacagacggcgcgggcgctgtgaccgtgacgagcccggaggacttctcgttcaacctttcgcactacacgcaggaggaaatgacggagaagatgcacaattacgagcttacggaaagccccgacaatgtgttctgcttcgactgcaagatgagcggcgtaggctccaacagctgcggcccgcgccttgcgaaggcgatgcagtttgacgacgagacgttcacgtttaagtttgacctgaccgtggaataagacgggcaaaatttgataaatcagagccgccgtgtgggagtttttccgcacggcggtttttctgtgtagctgcgtgcaaacagcccagtggactgtttgcacgtgggagacccaattagagggtctcccgaaaggcggcaatgccgcctttttatgctgggcagagagagaaagtacgaatgagaggcaaagactaaaaatacaaaaacgcagggattatgcggatgaatctgtgtaaaattattgacaaaaaggcttgaataccgtatactttagttaaataaaggagttgagtccgatggttttaatataagcgattccggtacaatgaggaagggagaatttgctatgaaaagaaccgttgtaattttacttgttttactgatgggattgctgaccgcgtgtgctgtgccgccgaaaacggaggcgaacgtgaccgacccggatgccatgaatgctaccgcagtgcgtcagacagaagcggacaccaagacggattgggtgcagggcttgacggaacagcaggaagtcgagacagagatcgaaaaagctgtgagcgcagatacgcttgaccgtttgcagcaggatgctgcgaagctgcttgaagagtacgaaacggcgaagctggacggcacggaagaggaagccgcaaagctggacgaagcgtatgagcgtgtgcttgcggaaatcaatgcgatgctcggctgaaagtgaaaaaatggaatgtttgccgctgcatggctttttgggctgtgcggcggcgtttttcctcaagattttcttattttccggtgcttttgcaaaatatcttgaaaataagtccgtacaaattttgcgaaaggtattgcaaaaagttgtacggctttttataataaggttgtattgaacctgtgcaaacaggtatcctttttgaaaggaacgatgacatggcagacacagaaaagaaaactgcgaaatatcgctttctggtggataccatcaaggagaagatcaaaaacggcgaatatgagcccggcgaacgcatggaatctgaaaacacgctttccgagcagttcgggtacagccgccaaaccgtgcggcaggcgctttccgtcctcgagcaggaggggctcattgaacgcagacgcggcagcggcacgtatatcagctccgagagccgacgcacgccgcgcggcaacagcatcgccattgtgacgacgtatatttccgactatatttttccaacgatcatccgcggcattgaggagacgctgacgaatgcgggctatgatttgaccctgaatgtgacgaacaaccacgtggaggaggaagcgcgcattttgcagtcgctcatctcccgccgcgtggacggagtgattgtggagggcacgaagacggcgttcccgaacccgaacgtggagctttaccgcagacttgaaaaaatgggcgtgccggtggtgtttttcaacagctattaccgcgatttacccgattccgtttacgtagtaacggacgaccgcaaggccggcttgcaggcggtggacctcttgattgaaaaggggtgcagacgtatcggcggcgtgtttaaatctgacgacatgcagggccacgggcgatatgcgggcttttccgaggggcttatccacaacggatgcgtccttggcgacgacaatgtggtttggtacacgacggccgagcgcagcaggctttttcgccccgacaacagcgattacatgtttgagcgcctgcgcgggtgtgacggcattgtgtgctacaacgaccagattgcgtatggggtgattgacctcttacagaagcacaatgtgcgcgtgcccgaggatgtgctcgtcatcgggtttgacgattcgagcatttcggaatactcgccggtgaaaattacctcttttgtgcacccgaaggtggagatgggcagagccgcggcgaataagctcatccacatgctgcgcagcagcgacccggagcagccgcttgtgctcgatatgccgctgcacgagaaagaatcgacaagacgataaattttgatataaaacagtttgaaaggaacgaatgaatatgaagatcgagaaattatccccggcatttaaggactatctgtggggcggcacaaagctgcgcgacgtttacggcaaaaagtgcgactatgaaaaggttgcggagagctgggaactttctacgcacccggcgggccagagcgtgatagacggcggtgaatacgacgggctgaaattcggcgagtatctggaaaaagtcggtgcgaaggcgctcggtgtgaacggtgcgaagtttaaggagttcccggtgcttatcaagttcatcgatgcgaagcagccgctttccgtgcaggtgcacccgagcgacgaatatgcgctgcgcgtggagggcgaatacggcaagaccgagatgtggtacgttgtggactgcgagccgggtgcttcgctgtacttcggcgtgaaccgtgcgctgacgaaagaggaattcaaaaagcgcattgaagacaacacgctgacggatgtgctctacaaggccgacgtgaagaagggcgacgtgttcttcattcagtccggtacgatccacgcaatcggcgcgggaattctcatttgcgaaattcagcagaattccaacacgacataccgcgtgtacgactacggccgccgcggtgcggacggtaagctgcgcgagttgcacattgataaggccattgacgtttccaagctgaccccgagcgacacgtccgacaagcagggcaagccggaggagattcccggaggcacaaagtgcgcgctggcttcctgcccgtactttacgacggagaaatatgttgtggacggcgaagtcgaaattgatgtgacgggcgattcgtttgcgtcgcttgttgtgacggagggcagcggcaaggttgtcggtagcgagaacgaagtggagttcaagccggcggacagcctgtttgtaccggccggcagcggcaaaattaagattaatggccactgcacggtggtgaagacgacggtttaaaagggaaaacgctatgaagatggagtttgtagacgaagctgaactgcagaaagctgtggacgagccggaggacgaggtgcgcgggcgcattgtgctggtcggcgagccgatggggcttttcattgcggaggaactcggcgagctggaggatgtgacacacttttcggcggctgtggccggtgcggaatataacgtggcggtgggactttcccgccttgaccatgaagcgctgtactgcacgcgtctcggtgacgacccggtgggcaaacgcattttgaagagcatgaaaggcaaccacgtttccgacgcgcttgtgaccgtgacggacacggcttcgaccgggtttatgatgaaaggcaggaccgaggcgggcgacccgaagatcgcgtatttcagacggaacagcgcggcttcgcagatctcgacgcatgacatcgataagctcgacttatacggatgtgattttctgcacgtgacgggtatttttccggcggtgtcgaagtcggcattggacgcggtgaaacgattgatgagccgcgcgaaggcgctggatatgtttatttcgtttgacccgaacctgcgcccgcagctttggaaggacgaaaaagagatggtgcgcacgctgaacagcctcgcacaggaagcggacctcgttttgccgggccttagtgagggcaaaattctcacaaagcgtgacacgccggagggtattgcggagttttaccacgagcgcggcgtagacagcgtgattgtgaagctgggcgacaagggcgcgtactggtccacgggcggcgagcacggcacggtgccggcattcccggtgaaaagaattgtggacacggttggcgcgggcgacggctttgcggcgggcgtcatctccgctgtggcggagggcatgtccttgcaggaggctgcggcgcgcggcacggtaatcggctcgatacagattacacaccggggcgacaatgagggtctgccgacgcgtgcggagcttgagaccatcacaaaagcgggcattgtgtaaattctaataataacggtgccgcgcaggaaatgagggtttgttctgcgcggcattgtgctatttggggagtgagaaaaatgggcagaaaagaaacggtggagctgacaaacatgtgcatggtggaggacggcaagggcaacgtactcgtgcagaaccgtcttgacccgaactggtcgggtatcgtttacccgggcgggcacgtggaagcgggggaatccatcacggcatcggtcattcgcgaaatccgtgaagagaccgggctgacgatcgaaaacccgacgctgtgcggtgtgaagcagttctggcttgataacggcgtgcggtacattgtgtttttgttccgcgcggataaatttacgggcgagctgcacggctccgaagaaggcgatgcgttctggctgccgcgggaagagcttttcgagcaccagacggtggaaagctttgagggcttagtgcacgtttttgagacgccggaatgcagtgaagtttattataaagacggcgaaacgcgttttgcatgatttgaaatttgaattcgggaggaaaattttatgacaccgcataacgaagcaaaaaagggcgatattgcaaaggtggttttgatgccgggcgacccgctcagggcgaaatttattgcagaaacgtttttagaggatgctgtgtgctttaatacggtgcgcggaatgctgggctatacgggcttgtataacggcaagcgtgtttccgtaatgggcagcggcatgggtatgccttctatgggcatatacagctacgagctgtatcattgctacgatgtggaagcgatcattcgtatcggtacggcgggcggcattgcggacggcgtggagctgcgcgatttagtattggcgatgggcgcgtgcacggactcgaactttgcgcaccagtaccgtttgccgggcacatttgcgccgacggcgagctttgaactgcttgaaaaagcggtgcagacggcgcgggagaagaacttacgttatcgcgtcggcaacgtggtgacgagcgatattttctacggcgactgtgaaaatgagaccgccgaatggaaaaaaatgggcgttctggccgtggaaatggagacggcggcgctgtatatgacggcggcgcgcgcgggcaagcaggcgctttccatcacgacggtatccgacttgccgctgaagggggaatcaacctcgagcgaagagagacagaagacgttcacgcagatgatggaggtagcgctgacggttgcctctgaggcggtggacggacatgacaaatgaggtcataaaaaagctttcggaagcggcgcttgatgtgcggaaaaaagcgtactgcccgtactccggctttgcggtgggcgcggcgctgcttgcgaaaagcggtgaaatatacacgggcgtgaacattgaaaacgctgcgtttacgccgacgaactgtgcggagcgcacggcgttttttacggcgattgcaaagggcgagcgagatttcgtcgctgttgcaatcgcgggcggcaaggcgggcgaggagcccgaagacttctgcgcaccgtgcggcgtgtgcaggcaggtgatgcgggaattttgcggggacgcgtttgtgattattcttgcaaagcccggtgaagaaaaggtttacacattaaaggatttgctgccgcagagtttttcgccgagagacgttctgggcgaaaaagcgaagcggtaaaaaaggcggtgatttttgtgctgcatattttggacattatccgcaaaaagcgggacggcggaacgctgacaaaggacgagattgaatattttgtgcgcgggtgcacggacgggagtatcccggactatcagctttcggcgcttttgatggcgatttatttaaacggcatgacgcacgaggagacggcggagctgaccttggcgatggcgcattccggcgacatggccgacctttccacgatacacggcgtgacggtggataagcattccacgggcggcgtgggggacaagacgagcatggttattgtgcctgtttgcgcggcgtgcggggtgaagattgccaagatgagcggccgcgggcttggacacacgggcggcacggcggataagcttgagagcattcccggtatgcggatcgatctttcgccggaggaatttacagcgcagatcaataagatcgggtgcgcgatgatcggacagacgggcgagctgtgtccggcggacaagaagctttatgcgctgcgtgacgtgaccgggacggtggagagcgtaccgctcatcgcttcgagcatcatgagcaagaagatcgcttccggcgcagagcggattttgctggacgtgaagacgggcagcggcgcatttatgaagacaacggaggacgcgattacgctcgccgaggaaatggtggagattgcgaagctttccggcaggcgcgcagcggcgctcatcaccgatatggacaggccgcttgggcacgccgtgggcaacaccttggaggtgctggaagttttggagacgctgcacgggcgcgggccggaagaccttacggaagagtgtttggagcttgcggcgaacatgatctggctcggcgagcaggcggagagccttgaacacgcgcggaagaaagcggaaacggcactggagacgggcaaagcgttcgagaaattctgcgaaatggccgaggcgcagggcgcggatgtgcggtacttgagagaacccgagcggtttgcgctttcgccgatgaaaaaagacgtgtgcgcgccgcgcagcgggtatgtagtgcatatcaacgcggagcaggtgggcatggcaagcgtgcggctcggcgccggacgcgagaaggccgacgatatgctcgactacggcgcgggcatcgtgctgaaaaagacggtgggcgacgcggtacaaaaaggcgaggtgatcgccgaactgtacggtgcgagcgcagaaaagtgccgcgacgcggaaagcgtgctgcacggggcgttccgctacggcgacgagaaaacagaagaatgttcacttgtactggcaagggtagagtaaaataaaaaaccgcacctgaaaaggtacggtttctgtgcgttcggttttaacgtttgcggttaaaatcagccgcgctcggggccggtgacgggctcgtcgtaatcaacgccgaaggtctcgacggtgactttcgtcatgacctgatcttcgcgcgggcggtcggaccaatcgcgcggggaggaaacgatggcctgtgcgacatcgatgccctcggtgaccttgccgaatgcggcatactggccgtcgagatgcggagcgtcatcgaccatgatgaagaactggctgcctgcgctgttcgggcgctggcttcttgccatggagagtacgccggtggtgtgcttcagatcgttcttgaagccgttcatagcgaactcacccttgatgccgtagccggggccgcccatgccggtgccttccgggtcgccgccctggatcatgaagccagggatgacgcggtggaagatggtgccgtcataaaagcccttctgaatgagggaaataaagttgttgaccgtgttcggcgcaatctcggggtaaagctccgccttgatggtaccgcgggtggtctcgaaagtaacaataggattctgcataccgaataactcctttcatagaggtctttcgggaagaaagaccgttcgtaaaattcagtataccatatttaatttgaaattggaagtgattttgctttgaagttgatttcttggaacgtaaacgggttgcgcgcctgcatgacaaagggctttaatgactttttagcggcggaagaccccgatgttatctgcttgcaggaaacgaaaatgcagcgcgagcaggcggattttgattttgcggggtacacggaattctggaactctgccgagaaaaaagggtatgccggcacggcgatctttacaaaaacagagccgcttaatgtggcgtatggcatcggcgacgaacagtttgactgcgaggggcgcgtgatctgcgcggaattcccggagttttaccttgtgaccgtgtacacgccgaacgctcaaaaagagcttgtgcgcattgattttcgtatggcgtttgaggataagttccgcgcgtatctcgaaaggctgcacgaaacgaagccggttattgtgtgcggcgacatgaatgtggcacacaggcgcatcgacatcaaaaacgcaaagccgaacatcggcagcgcgggattttcgtacgaagaaagagggaagttttccgaactgctcgcggcgggttttgtggattcgttccgcgaattgtaccccgatgcaaaggacgcgtattcctggtggtcgtatatgggcaaggcaagagaaaagaacgtcggctggcgcattgactatttcctcatcacggaggagctgaaaaagaatttggcggacagcaagatcctctccgacgtgatgggcagcgaccattgcccggtggagctcatcttgaattttagcgaggaaaacgcatgatttttaaggagaaaaagacaccgacgcttttgatgatgccttcggcgaacggatggcgcgcggtgcacaagaaatataaaaacgaatacggcacggtgatctgcaccgaaaagggtgatacgatggaagtcgtgacggacttcggtgaattttccaccgagcgtacggaagcggtggaaagcgctgcggcgatgatttttgaaaacaacggcgtgaaagagattacggtggacggagagaagcttacccgcgaagcgtggcaggaaaaagaagatgcgcgcctaaatgcgctgcacaggacgcgggaggattacaaaaatgtgctcggaaagcccgtgcactgcgtgacggacaggccgcttggctctgcgcacccgcgctatccggagatgatctaccccgtgaactacggctatgtgccgggcgtgatggcgggggataacgccgagcaggacgtgtacattttgggtccaacggagccgcttaaaacctttgacggtgtggtgatcgcagtggtgcatcgctttaacgacgtggaagacaagtgggtggcggcggaaaagaccggcgtttacacggcggaggaaatcctgaaaattctcgattttcaggaaaaatactacgaaagcgagctgatcctctaaatgaccgaggaactcatgcgcaggctacgggtcatcacgccggaggaacagcgcattttggacggcggcgcggtggacaaggcggcgtacacggcgcgggcggtgtttacggtggacagcgagaagcttttggagcgcgggcggctcatctccgtgcgcgcgcacacgcggtttgcaccgttccccagacacgcgcacagctatattgaaatcatgtacatgtgctccggcaagacggtgcaccgcatcaacggcggcgagcccatcaccgtacatgcgggcgagctgctgtttttggggcgcggcgcttcgcatgagatagaacgtgcggaatatgaggacattgcggtgaatttcattgtgctgcctcagttctttgatacggcgttggagcgcatcggcgcggacaacgcgcttgggcggttcatcgcgaacagcatcagccgcgcggggggctcggattttttactgtttagagttgcggatgtgctgccggtgcagaatctcgttgaaaacctcgtttggacgcttgtgaacgacacgaaaaaccgcagacgcattacgcagaacacgatggcgctgctgtttttggagcttttgaactgcacggataagctggcggcgagcgaaaacgagggcgatcacagcgcacttgtgatgacggcgctgagggagattgaagaaaattaccgcacggcgagcttgacggacattgcggaaaagtacggtgtgacgatttcgtacctcagcgcggcggtacacagcacgacggggttcacgtttaaatcgcttttgcggcgcaagcgaatggagaaagcggcggcactgctttccggcacgaagctttccgtgagcgatattatcatggcggtggggtatgagaacacgagctatttttacagggcgttttcggaaatgtacggcgtgacaccaagggagtatcggttgaggcagagaggttagtacgcataaaataacgccgcacgctcgatgaggaaaacgagggtgcggcgttgctttatttctgagaatttgccgcctttgaaaaggcgggcgaaacttttaactacgcttttcggaagctcggtttacttcacgaatctcaaaacattccacgaggttttcgtgaggttcgctttatagagattgccgtctttttcggttctgtccgtatggagcttcggggtgacggcgctgtgctcggcggtgttgacggccttcatatccgggttttcaaggacgatgtgctctgcgaggcggtaatcgccgaaggagcgcaggtcgaggtcgaggacgatgtcgtccgtcaggctgcggttgacggcgaagacggtaacttcgtccttttcgtcgttccacacggcgatggactcgacgtcggtgacatcggtgaaatcgatggtatcgtgctttgtggaggtgagcaccggctggagcgcaatgccgcggccatatttggaggcgtggagcagcggataataaatcgtctggcaccatgcggggccgttttcttcggtcataatgggtgcgatgacgttgacgagctgtgccatgcacgccatttttacgcggtcggagtgcttcatcagcgtgatgagcatgaggccgacgagcagggcgtcttcaaaatcgtagtggtcttcgagcaggtgcggcgcgatttgccacgggcggttcttcatggtgtcggcatcggtggcatcggcgtggaaccagacgttccattcgtcgaagctgaggttgatgtttttctttgcgcgcttcttcgctttgacgaaatcgcacgtggagatgacggtacggatgaagtgatccatatcgtcgctctgggcgaggaagtttgcggtatcgttgaagcggttgccgtagtactggtgcagggagatgtaatcgacgctgtcatacgcccaagagagcgcggtgttttcccactccgggaatgtgggcatgcccgtgctggagctgccgcagagcacgagctcgatggacgggtcaatctgcttcatggctttggcggtctcatcggcaaggtggccgtattcgtcggcggtcttgtggccggtttgccacgggccgtccatttcgttgccgaggcaccagaccttgatgttgtgcgggtctttgacgccgtgcttgatgcgcaggtcgctgtatttggtgccggacgggtggttgcagtattcgagcaggttgcacgcggcttcaatgccgcgtgtgccgaggttgacggcctgcatgatctgcgtgtcggcttttttcgcccactttgcgaactcgttgatgccgatatagttcggctctgtgctgcgccatgcaagctcaagacgcttcgggcggtcttctacgggacccacgctgtcttcccagtaaaaattggagacgaagttgccgccggggtaacggacgatcggcacttgcagctcgcgcacgaggtcgagtacgtcgcggcggaagccgtcttcatcggcagtggggtggcccggctgccagatgccgccgtatactgcacggccgaggtgctcgatgaacgagccgtagatgcgcttatcgattttagaaatttggaaatccttttcaatggtgagttttgcctgttttgccatagacctgatctctcctcagaagttgtatgtacaatttatgtgttcattttagcttgaaagccttggattgtcaacctatttcggcggaattcttttgctgtgtgccgaaaagtgaagcgcggatttgtgcagtttggcgggagaaaattctgtgcggcagaagaaaagttaaaataaagatagttttaagtgaaaacaacgtccttatttttgaacacgattcctgctatactattgctgtaaacgaaaaaacggagggcttatatgaaaacgtatttggcggtggacattggggcttcaagcgggcggcacattttggggtggctcgaggacggaaaactgaagctgaaagaaatctaccgttttaaaaacggggcggaagaccaaaacggccatttgtgctgggacattgaccgccttgaaagcgaagtgatagacggcattgcggcgtgtgagactgcgcccgagagcgtggcggtggacacgtgggcagtggattatgttttgctcggtaaaaacggagaacgcatctgcccggcggtggcgtaccgcgacagccgcacggagacggtgccggacgagctggaaaaaacggtgccgtttgcgtggctgtacggaagaacgggcattcagatgcagaagttcaacacggtgtatcagctggcggcgcagaaaaaagaaatgccggatgtatttgaaaaggccgaaaagcttttgatgatcccggattatctgacatacaggctttcgggcgtggccgtgaacgaatacacaaatgcgagcacgacggcgatggtctcggcagaacataagacatgggacaaggagatcatagcgcgggtgggtttgccggagaaaatcttcggcgcgctgcacaagccgggtgaagcgctcggcgggctgacggagcgcgtgaaggagaaggtcggctttgatttgacggtgcggcttgcggcttcgcacgacacggcttccgcgtttttggcggtgccggcgaaggatgagaacgcggtgttcctttcgagcggcacgtggagccttattggcgtggagctgaaagcgccggtgacgaacgacgagagccgtgcgcagaattttacgaacgagggcgggtatgagtaccgctatcggtatttgaaaaacatcatgggcctttggatgctgcagaatatgcggcaggagcttggagacgagaacagctttgataagttgacggagcttgcgcagagcgcggcggattataagggccgagtggacgtgaacgcagagtgttttttggcgccgaaaagcatgtgtgcggcggtgaaaaacgagcttatgaagcaaggattcaaagaaccgacggtgccggagatgctctcctgtgtataccacagtctggcggaaagctacgccgagacgataaaggcacttgaaaagctgacgggcaaagtatatacgagtttaaatatcgtcggcggcggcagccgggacgaatatttgaataaactcacggcgaaggcctgcgggctacccgtgtatgcgggcccgacagagggcacggccatcggtaatctcatcgtgcagatgatcgcggacggcgagcttgcgagcgtacagcaggcgcgtgacgtgatacgggacagctttgaaattaaaatttacgaaccctgaaaagtgtattataatagagtaaaaacaaaacggaaaggacgataaaatgctgaaaggtaaaacggttttactgggcgtgacgggcagcattgcggcgtacaaaattgcggggcttgcgagtatgctgaaaaagcagcacgcggatattacggtgctgatgacgcagaacgccacgaattttatcaaccccattacatttgagactttgacgggcaacaagtgcctcatcgatacgttcgaccgcaatttccagtacagcgtggagcacgttgcgctggcaaagcgcgcggacattgtgctcatcgcccccgcgagcgcgaatgtcatcggcaaaattgcgaacggcattgcggacgacatgctgacgacgaccgtgatggcgtgccgctgcccgattttgatttcgcctgcgatgaacacgaatatgttcttgaaccccattgtgcaggataatcttgcaaaactgagacgcttcgggtacacggtgatcgagccggacagcgggtatttggcttgcggtgatataggcgcgggcaagatgccttccgaaaagacgctgtttgactggatcatgcagacgatcggtgcggagaaagaccttgcggggcagaaaatcctcgtgacggcgggcgcaacggcggagaagatcgatcccgtgcggttcatcacgaaccattcgacgggtaaaatgggctgcgcgcttgcacgccgtgcggcgatgcgcggtgcggacgtgacgctcgtctgcgcgaacatgaccgtggaaccgcctccgtttgtgacggtggtgaaagcggaatctgcggaagacatgttcaacgcggtgacgagccgtgcgccgaagatggacgtcatcatcaaagcggcggcggtggcggattaccgcccgaagacggtcgccgaggagaaaatcaaaaagcatgacggcggcatgagcattgagcttgagcgcacgcaggacattctggcgtacctcggcgcgcacaagcccgcggggcagttcctctgcggctttgcgatggagaccgagaatctcattgaaaacgcgcgtggaaagctcgagcgcaagaacctcgatatgatcgcggcgaacagcctgcgcacgaagggtgcgggctttgcgggcgatacgaacgtggtgacgctgctgacaaaagacgaaacagaggagttgccgatgctctcaaaagacgagacggcagaccgcattttaacaaaaatcaacatacttcggaaaggatgaacgatatgacacagtatgaggcggcaaaaaagcgctatgccgagcgcggtgtggacgccgatgctgccatcaacacgctgaaaagcgtgccggtctctctgcactgctggcaaggcgacgacgtgcgcggctttgacggcgacccgaatgccccgctgacgggcggtattcagacgacgggcaactaccccggccgtgcgcgcacgccggaggagctgatggcggacatcgacgaggtgctgcgcctttgccccggcacgaagaagctgaatttacacgcgagctacgcgatcttcaccgaagaaaacggcggctgggtggacagagataagctggagccgaagcactttgcgccgtgggtgaagttctgcaaggagcgcgagctgggatgtgactttaacccgacgtatttttcgcacccgaagtgcgacccgctgacgctctcgagcccgaacccggagacgcgcaaattctgggtggagcacggcaaggcatgtatccgcatttcgcaatatctggcggaggagctcggtcagccgtgcatcatgaacatctggacgggcgacggactgaaagatattcccgccgaccgcatgacgccgcgcatgctgtataaagagtctctcgatgagattctctctgagccgtacgattttaaccttgtaaagccgtgtgtggaatcgaaggtgttcggtatcggggtggaggcgtacacggtgggcagtgcggaatttgcgctgagctatgcggcgatgaataaagataagtgcatcccgctgctcgataacggccactaccacccgacggaggtcgtatccgataaaattccggcgatgctgacgttcttcccggagattgcgctgcacatcacgcgcggcgtgcgctgggacagcgaccacgtggtgctgtttgacgacgagacaaaggagattgcgaaggaaatcgtgcgctgcggcgggctttcgggtcgtgttaagattgcgctcgattactttgacgcgtccatcaaccgtatcggcgcgtgggtgacgggcttccgcaatgtacagaaggcgctgttgttcgcgctgttgcagccgacagaggagctgacgaagctgcagaacgagcaggacttcacgtctttgatgatccgcgcggaggagttgaaaacgatgccgttcggcgatgtttgggcggaatactgcaaggagcagaatgtccccgcagacgacatggcgtggctttctgaaattaaaaaatacgaaaacgaagtgcttttaaagcgctgaggaggtatataaaaatgatgacggaaattcccgcagtacgcggttttatccgcatgtgcacggatggctgggagcagggctggcacgaacgaaacggcggcaacctgacctaccgcatgaagccggaggaagtggagcagtgccgcccgtttttcaccgcgccgcgcgagtggaacagcatgggcgtgcaggcggataacttaaagggcgaatatttcatcacgacgggcagcggcaagtttttgcgcaatgtgcaggatgacccggagcacaacatcggtattgtagaaatcaacgatgcgggcgacagctggcgcattgtgtggggccttgagaacggcgcgcgcccgacgagcgaattcccgagccactttatgaaccacagtgtgcgcaaggcggcgacgaacggcgcttaccgtgtcatttaccacgcgcatacgccgaatctcatcgcgatgacgtacatcatgccgctgacggcgcgcgactttacgcgtgctttatggcagagcgccacggagtgcccggtggtgttccccggcggcgtgggcgtggtgccgtggatggtgccgggcggcgcggacattgcaatggcgacgagcgagctgatgaaaaaatatgacgcggccgtttgggcgcaccacggcttgttcgtttccggaccggattacgacattacgtttggcctcatgcacacgatcgagaaggcggcgcaaatttatatgcttgctattacggcgggcggcggtaaaattcgccaaaccattacagacgacaatttgagagccattgcgaaggaattcggcgtggaactgaacgaagaatttttgaactgatatttacagttttgttacaaacaatctgtgcggacaggtgtataattaacttagttaaaaaattcccatatttgggagtaggagatgttttttatggtcagcagaatcgtattgaacacaatttcttatcacggcaagggtgcgattgaaaagattccggaggagcttcaggcgcgcggctacaaaaaagcttttgtttgctcggacccggaccttttgaagttcggcgttacgcagaaggtgacagatcttctggacaaggccggcttcccgtattccgtttacagcgagatcaagccgaacccgacgattgagaacgtacagcacggcgttgaggccttcaaggtttccggcgcagactgcatcgtgaccattggcggcggctcctccatggatacagcaaaggccatcggcatcatcattgagaacccggagttcgcagacgttcgctctctggagggcgttgcgccgacgaagaagcacgcggtgttcaccattgctgtgccgaccactgccggtaccgctgcggaagtgacaatcaactacgttatcaccgacgtggaaaagaagagaaagttcgtctgcgtagacacgaacgacatcccggagatcgcggttgttgacccggatatgatgtcctccatgccgaagggtctgaccgctgcgaccggtatggacgctttgacccacgccattgagggctacatcacgaagggcgcctgcaccatttccgatatgttccaccttgaagccattcgcctgatttccgagaacctgcgcgacgcggtgcagaacaccgaagccggcagagagggcatggcactcggtcagtacattgcaggcatgggcttctcgaatgtcggcctcggcatcgtacactccatggcgcacggtctctccgctctgtatgacaccccgcacggcgtggcttgcgccatcattctgccgaccggccttgagtacaacaagtccgttgcaggcgagcgttaccgcgcagtaggcaaggccatgggcgttgagggcattgacgcgatgaccgccgaagaggctgccgatgcaacgattgcggctgtgaagaagctgagtgaagatgtgggtattccgacaaacctgaagggcatcctgaaggaagaggacgtacagttcctcgcagagagtgcatttgcagatgcttgctgcccgggcaacccgcgcgacacctccgttgaggagattgccgagctgtacagaagcttgatgtaatcgctttttgcctaaggtaaccgaataaacatagagacccccgctttcggagttttccgggagcgggggtcttgtgcgttatggggttatacggatttttttgcgggaagacgcgcagagagcttttcggtgatgcggcagaacaggcggcggatattttcgatgccgacggctgcaagcacgcagaaaagcggaacgttggtgtacaaataacgggcgcgtacttcaaacaggagctcaaagacggtgaggccgatccaagtgagccacaggatatttaagatttttgcgtgcttatgactgaagctgctgaacagaccggcggcgccaagcagcaagatcatgagccaaatgaattgctcgaaggttgtgaaatacaaatagcggctgccgtcggggtagtagatgctgcggaggaagggagcggcttttgtattgggcgggtcaaaaacggtttgaaggaaatttccctcttttccccatgcgaatgtgccgtcattatagagcgtgagcattttttgtgcgagctgtttgagcgtgccgaaaaagcccatttcctgtaaacgctgtttgccgacggcgatatttgcctgcgtgcgctcggaagcggtgacaaaagagcgggaatagcgaacgtcttcggcggaatagacgccttttttttccgggttaagacccatcatccagaaatgtgcaatgccgaagctttgctcgttatcaagctgaatgtgatagtgggaacacagaaaacctgtaccggctttaacggcgaaaaaggtgatggcgactgtcaaaagtgagagcagaagcggttttaacagatgcttttcggacagtgcgtaaataccttcaatcaaaaaaacggcgataagcaaaataaaacactgtggcttgataaaatacccgagtgtgccgatgaaggcggaaagcacataggagagccatttgtgttttgccggacggatgaatacatagagtgtaaggatagggaaaatcagccctaaagcgtctgtgtagcagatgacgttccacggggaaagcccaaagctgagtaccgcgagaaaaaagccgaaaaaagcgtatagctttcgtgtgagctgcgcggcggttttataaacgagcagacaggaaagcgtattgagtgcgcagttaacggtgatgacgcacaaagcctgctgtgtatcggagaaaatgctgaaatatttattcagcttgaagacgaacagctcgaagaaaaagtacagcagattattgggatagttggaaaaatagcggatatcgaccgactgcttgtgcatcagattgcgggcgttttctgtaaggaggcccgcgtcccaaccggtttcgaaataaatgttataggaaatatagagctgtgcggaaaataaaagcagacacagacagtatatgagcacatcggacgatacggtcggccgatgccacgaaagcttgacctgttgcaggcggtcgagagacagaaacagcacaaaaaaggcgataccgaacagaagcagagcgatatttgagagcagaaatgtctgctttttggcgtatgtacattgcgtaaaaaacaggagcaatacaaaaacgcagccgaaaacggagccgaggaaaaatttggaagctccgaaagcgaattttttcataaaatgtacctcttaaactcaacatgccgtgagcagcgggaaaagaaatcccgaactgccgagacaattcgggatccggtttggttagcgtatcagtgttcgtccaagactttttcttccggttcggctttgaggtgggtttcgatgaggaaacgggggcgctgcttgacttcgctgtaaattttgccaatgtagccgccaacgacgccgaggcagagcatttgcagaccgccgagcagccagatggacgcgacgatggctgtccagcccgcgacggtgacgccgcacaggtgcgagatgagcgcgtacaggaggccgaagatgctgaggacggagatgagaatgccgaggttggagatgagctttaagggctttacgctgaacgacgtgatgccgtcgagcgcgaaggagatcatcttttttaaggggtatttggattcgcccgcgaaacgctcggcgcggtcgtaatagacatagtcgcttttaaagccgatgagcggcacgatgccgcgcagaaacaggttgacttccttatactcggaaaggccctcgagcgcgcgacggctcatcagacggtaatcggcgtgattgaagacgacgtctacgccgagaatcttcatgaatttataaaagccttctgcggtggtgcgcttgaagaacgtatcggtctcgcgcttgttgcgcacgccgtagacgacgtcgcagccttccatatatttttcgacaaagcggtcgatgacgttaatgtcatcctgcaggtcggcatccatgctgatggcgcagtcgcacagcggcatggcggtcatgaggccggcgagcagggcgttttggtggccgcggttgtgcgcgagctttacgccgtccacatagggaatagcttcagcatattcggagataatcgcccaggttttatccttgctgccgtcatcgacatagagaatgcggctttcgggatcgacctgctcggtgcggatcatggtgtgcattttttcggtcagacgcttggtggtctccggcagcacggcttcctcgttgtagcaaggaatgacgaggtacaagaccggaatattacgttcagtcgtcattatcaaaaccttctttcttttccaaagcgcggtcggtttgactgcgcggttttatgtgaataatcccgctgttttcaaaatgcgcgccatgcttttttgcatagtgggagagcgggcgcagcaccatattgtggcgggcgagcggcacggggacttctttgaagatcgtgcgcatgagtaccatataaagtacgaacagaagcacgcacacgacggtgattgccatgccgaggaacaggccgggcgtgcggtatttgaactcgatcttgacattggtgccggcgttgacgcggatggccatgaagccgacgttcaccttttcgatatcaaccttttcgccgttgacgtaggccgaccagccgtcttcgtacgggatgctgaagaacacgggcacgtcgcgacttgctgtgatggtggcgttaaagccggtatttgtgtattcaaaggtatcgcaggtgagctttgcgcggttttcgcaatctgttttgtaggtttccttggtgtaggagagttcgcttgtatcgagcggagaaagcatatcgccccattttgaaacctgcttatcggtgaggacgatgcccttgagcatcaaaagctcgcggtagctttcgcttgtgttttcgtaatctttttcggtgacgtagctgtcgtaggtgaagcccatgggaatgtaatgttcgttttcccaaatgtcaaagccgtttgtgttgccgtagtacatccagcccggcatggcggggtcggcgtagtcttcgccggcgaaatactcggtatcgtgatcgtcgtcaaaaagatacttgacgcttgtcagtccgcgcaggccgtagtgagtggtatccgggcgggaagcgacatcgcgctgcacgccgatggaatcgtagaactccatgagcgagccggggacgatgctgtggaacgcctgaatggactgtacctcccagaacatggcggagttatcgaggctttcgtagaaatccgtacggacgttgtcgtcgcgcaaatcgtctatggcgacatccgcgccgccgtttaaggcgtaggggatgatgtggtcataggtgtaatccgactgtgttttgccgagcgcgatgaagaaaacagaatacagcacgatggtgatgctgaggcagacggacgcggcgcggtagaacgggcgggagccgcggttataaaatgcaagaacaaagccgacaagtgcaagtgagaggagcgcaatggcggcgtatgtccagaagcgcgtggggtatttttcgagaccgaatgtgacatcggtaatctcgccgtccgttttggtgagtgtaggcatgaggccgatgacgagcgtcatggcgagcgtgatgagcgttgtccactttaaggagcggcgccaatcaacacgcgggttttcgagcgccatcatggtggcggcggccatcatgagcgtgagcatatagaaccagcgtgcgtaatacgacgcgttcatgagctggaacaaagcgttgaggccgggaataaacgccatgaagagcagaacgcagagcatctttttcagccagtggcggcgcttcagctgcatccagccgatgacgccggccatgctgaacatgggcagccatgcgccgagggacgcccatttggattcggaatccggggtgaagttcgggcgtgcgggaagatccggcgggaagaagaggcactgcaaaatgtgaatgtagcgctggttgcggtcataaagcagggcgctccagccgctgatgggattggaaacgcggtagttttgaatgatgcacagaacgcttggcacaagcagaatgcacgcgatgccgaggccgagcacggcttcgagcgcgagcaggaggaaatctttgaccgtgatgtgccagctgccggagagcagacgcacaaagaagtagatgaccgtgaacgtcaccatgccgacgaagaaataataattcacgatgcacgcggcggcgaccatgagcgcaaaaatgccgcgacgctttgtgtacatgtattcatcgagcgcggctaagagcaaagggaacacgatgatggcttcgtgaaaatgattgaaaaagatgttgtagatggagtagcccgagaacgcgtataagagagacgctaagagcgccgtgttggggttctttgcatagcggtgcagataaatgtagccagagagggaggcacagccgaactttaagatgaacagcgggcccatgaggtattgcagccactcgcccgggaacggaatggtgagccagaagaacgggctgccgagcaggtagaacgaataggaaccgatgaaattgacgccgaggtctgttaaatgattccagccgatgttgccggaacgaatggcatcgtgcgcgatgcggtagaacggcacctgctgcacattgaaatcgccgtagaacagaaagcggccgccgtctacgatcatgaacggcacaaagatgacaaaggccagagcgaggccgaaaaggaaggagaagaggaaataattgccgcgcggcttttgctggatgcgaccatcgcgcacataagattttgaggtatccaagtgaatgtcctcctgtatgtgaatttagaatgaggtttcttgtaagcgtggttaaaagtttttgatcgaccttttttcaaatgaaggtcaaaccgaacctgcggttcggtcgtggggtctcggggtgaagcccagagtcgtcgtccgcagacgacgaaaacttttttgcctcccaaaaatcagggctgggagaaaccaatgcttcgcattgctatcaaacagtccggtggactgtttttgcgcgggagacccaattagggggtctcccgaaaggcgtgtaacgcctttttaaaagagagattccccgcatctatatttaagcccagtataacacaaataaagggtagattaaaggcaaattctaatttttaaggaatttttattgaaatgtgcggggcagttcggtattataatataagtaaaattaaaaatacagaaaaatcagaaggatataaaaatgaaaatcggaaatctgactttgaacggtgtggcggcgctggctccgatggcgggcgcgaccgatcggccgtttcgcgagctttgctgctcgtttggcgcagcgtactgcgtgacggaaatggtctcgacgagagcgctgcagtataactataaaaaaacgcaggagcttatcacgctcggcgaaaaggaacaccccgtcgcgatccagatgttcggcgacgacccgctcatctttgcatctgccgcaaagcgcgccgcagcggccgggccggatgttattgatatcaatatgggttgccctgtgccgaaaattgcgggcaataactgcggcagcgccctaatgaaaaagccgccgctgtgcggggacattgtccgtgccgtgaaaaatgcggtcgacctgcccgtgacggtgaaaattcgtaagggctgggacgaaaacagcgtgaacgcggtggaggtcgcaaaatattgcgaagatgcgggcgtggacgccatttgcgtgcacggcagaacgcgcacacagatgtatgagccgccggcagactgggatattatccgtcaggtgaaggaagccgtgaaggtgcccgtcatcggcaacggcgacgtaaaatgcgtgcaggatgccgtgcgcatgatgaacgagaccgggtgcgacatggtgatgatcgggcgcggggcgctcggcaatccatggatcttcagggagatcaacggctatttcagcagcggtctgcgcattatgccgccgccgacgcttgcggagcgcattgtggtcattaaaaagcatatggatgcgctgtgcgccgcaaagggagaggggcgcggcatgcgcgaagcgagaaagcatgtggcgtggtacatgcacggtctgcgcggtgcggcggaattccggcgcatggcgggcgagctggaaacgctcagcgacctcgataaattgctcgagaaagtgtatatagaaaacaaagacgtgtcttttgacccgtaacggaaaggaagatcagcgtgaagcttttggtactggacggcaacagcattttaaaccgcgcgttttacggcattaagctgctgacaacgaaaagcggagagtttacaaacggtattgtcggatttttgaatattctggaaaaagtgaaggacgaaacggagccggacgcggtggccatcgcattcgatatgaaagcgccgacattccgccacaaggcctatgcgggttataaggcgcagcgcaagggcatgccgccggagcttgcggcgcagatgccggtcttaaaggaactgctcggcgacctcggctataaaatcgtgacgtgcgagggctgggaagcagacgatattctcggcacgtttgcggaaacgtgcgaaaacacggacaatacgtgcatgattgcgaccggcgaccgggacagcctgcagcttgtctcgccgaaaacgacggtgcgccttgcaacgacgaaattcggtcagtctgccgtgacgctgtgtgatgaggcgtatatcaaagagacgtacggcgtggaaccgaagcagctcatcgacatcaaggccattcagggtgatacctcggataatattccgggcgttgcgggcatcggcgaaaagggtgcgggcgagctgatccgcaagttcggctctttgcagtatatttacgacaatttagatgagctggacatcaagcccggcatgagaacgaagctgatcaattccaaagacaacgcgtttttgagctacgacctcggcaccatccgccgcaatgcgccgatcgatacggagcttgcgcattatattcccggcgagggtgaccccgcagccgcggcgcagatcatgacgcgtttggagctctttaagctgatggaacgcctgcacctgactcccggcgcggcgccgacggcgaacagcgcacaggccgaagaaacggctttgctgcctgtgaagaattataaagacggcgcagcggtgctcggccagtgtgaggacgagggggcggcgtattttgtgccggtgtttgaaaacgacgaattaaagcagcttgtgtttaacggtaagttcgacgcgggtaagccggcgattgcggtcgtggatgcggacgacgcgtttttgaaggcgttcctcggcagtaaggtgacgaaaaagtacacgtttgcgctgaaaaagctgcaccgcacggcactgcatttgaagacttcccttgaaaacgccgtgatggacacggagcttgcggcgtatcttttgaacccctcgggctccgattacggtgtgctgcgtttggcggcggaatacggcattgccgtgcccgcatatgaggacgcgaacatgcaggcggcggctgtgctgcccgctgtttgtgcggcgctgcaaaagggcatcgacgaaaacggccagcacgaattattgaagaacattgaaattccgcttgctttggttttgggcgagatggaggaaagcggcttccttgttgaccgcgaggccataaaaacctacggcgaggtgctttctgagcaggtggacgcgctgcagaaagaaatttatgaagacgtggggtacgaattcaacatcaactccccggtgcaactgggcgaagcgctgttcgtaaagctcggactgccgcacggcaaaaagacgaaaaagggatactccacaaacgcagatgtgctggagggtctgcgcggcgtgcatccggcagttgataaggttttgcgctaccgcacgctgacgaagctgcgttccacgtactgcgagggcttgctgaaagccatcacggcggacgggcgcattcactcgagcttcaaccagaccgaaacgcgcacggggcgtatttcctcgactgagccgaatttgcagaacatcccggtgcgcacgccgcttgggcgtgaattccgccggttcttcatcgcaaaagagggaaatgtgcttgtggacgccgactattcgcagattgaactgcgcgtattggcgcacgtggcaaacgacacgcagatgcaggaggacttccgtcttgggcgcgacatccacaccatgacggcggcgcgtgtgttcgatatgcccgaagaccttgtgaccccgcagatgcgtagccgcgcgaaagcggtcaatttcggcattgtgtacggcatcggcgcgttctcgctttcaaaggacatcggtgtttcccgccgcgaggccgaggactacattcacgattacctgcgcaattataagggcgttgcagactatatggagcgcgtggtggaggaagcgaagaaaaacggctatgtggagacgctgttcggccgcagacgctatctgccggagcttgcaagctccaatttcaacatgcgtgcgttcggtgaacgtgtggcgcgcaacatgccgattcagggcacggcggcggacatcatcaagattgcgatggtgcatgtgcgcaaccgtttgaaagccgaaaatctcgatgcaaagctgattttgcaggtgcatgacgaactcattgtggagtgcccggaagcggaaagcgacacggtgaagaaaattctggaagaagaaatggcaaacgcggtgcagctgagcgtgccgatgctggcagaggccggaagcggtaagagctggtatcaggcgaagggctaagggtttatgatgatattttgctgtcccgcatgcggcagcgcgttggaaagagaagaccgcgcgctgcgctgcgcaaacggacattcttacgatattgcgcgccaggggtatgtgcatcttctgcccgtaaagcagatgcacgcgaaaattcccggcgacacaaagcagatggtggacgcgcgccgcgtgtttttgagcggcggctactacgatgcgttccgtgacaaactggcggagctgacggacaaatatctgcccgagaacggcgttattttggacgcaggctgcggcgagggcttttacacttcggctttatatgaaaaagccaaagcgaaaaacggttcggtttccggcgtggacatctcgaaattcgcggtgaaagcggctgcgggcaaatataagggcatcgatttcgcggtggcgagtttatttcacctgccgtgtgcggaaaacagtgcagatgtgctgacggacgtttttgcgcctattgtgccggaggagttttttagggtgctaaagccgggcggcgtaatgatccttgcggtgccgggggcgcggcatctgtacggcatgaaagaggttttatacaaagagccgtatgagaacgaagagcacgacacggcctacgacgggtttgaatacctcggccgtgcgtatgtgcaaaagtttatcacggtgaacgggcaggagaacattgaagcgctgttctccatgacgccgtactattggaagacggacgtagagggtggagagcgtctgcgcgcgctcgatgtgctcgagaccgagattaaatttgactttctggtttacaggaagaagtaggcgggtgcgtctttcagcagctttgtgcggcacaatgttgtttattattgttgttttgttgtcattcattgaaaattaaagaatacttagtagaattctctcccgaactgtgctatgataggtagcggtcgttcgggagcgttttcattttggaagacgaaatacgaccgattacagtagtattcgaggtttataatcaaagatgaaaattttgtttgtctgcaccggcaacacgtgcagaagcccaatggcggagggcattttccgccgcgaaatggagcagcgcggctttgagaacatcatgtgccaaagcgccggtctttccgcgctcgatgggcagcaccccagcgaaaatgcggtgctggcctgcaaggagatcggcgtggacatcagcggtcacattgcgcgccgctttacgccggaagaaatcgatgtgtgggacgtttatttcacgatgtcgaaaacccacgcgtacattttgatgcaggcgggtgtgccggcggagaaaatttacgtgccgcattacattgacgatccctacggcggggacctaaatacctaccgcaagtgccgcgacaagatctgcgaggaattgcagacgtttgagcagcatctcggtttttaaggagcgtttatgcagattgtttcgatgacggcggagcacgtttcgcgccttgcggagcttgaaaagctttgcttttcggaaccgtggagcgaaaaaggcctgacggaggagattgataatcctgccgcgtgctttttggtggcgatgcagcaagatgaggtgctcggctacggcggcatgcacacggtgctcggcgaaagctatgtggacaacattgcggtgttcccggagtttcgcggccatggtgtgggcagaacgctcatggcggcgctgatcgaaaaagcgcgggaaaacggcggcgttttcatcacgctggaggtgcggacatcaaacctgccggccattgcgatgtaccgttcgctcggctttacggaagcgggcgtgcgccgcaatttttatacagaaccaagagaggatgcgctggtttttacgctctctttctgaatttttagctatacgggggtaaaaagtatgcttttcggaaaaatcaaggcgcttgtcgaatacggcgtgcgcacggggctcatcgaagcggaagacatgatttacacgcgcaaccgtttattggaggcgctttgtgaagaggattacgcggatgaggaagcggagcagagcgaaaacctggcacttttgctggacggcctttgcgacgaagccgtaaagcgcggcatcatcgaggacggtgcgacgtcccgcgatttatttgacacgaaactgatgggccttttgacaccgcgcccgtccgatgtgaaccgcacatttcgcgcactttacaaggaatccccggaaaaggcgacggactggttctataagctttgcggagactgcaattatatccgccgcgaccgtgtggcgcgcgatttaaagtgggtgtataacgacccgcgtttcggtgcgattgatattaccatcaacctttcaaagccggaaaaagatccgaaggccattgctgcggcaaagaaaatgaaggcttccggttatcctgcctgtatgctgtgcaaggagaatatcggttatgcgggccgcatgaaccacccggcaagacagaaccaccgcgcaatcccgatcacggtgaaccatgcggattggtttttgcagtattctccgtatgtgtactacaatgagcactgcattgtgttctgcggcgagcatgtgccgatgcagattgacaagagcacgttccgcaagctgtttgattttgtggagcagtttccgcactatttcctcggctctaatgccgatttgcccatcgttggcggttccattttgacacacgatcactaccagggcggccactatacgttcgcgatggcgcgcgcgaacatggaggagcactgcacgctgcacggctttgaagatgtggaagcgggcatattgaactggccggtctccgttctgcgtttgcgccacaaaaacccggatcgcctgattgacgcggccgaccacgtattgaaagcgtggagaagctacacggacgaggacgcgttcatttttgcggagacggacggcgagccgcacaacaccatcacgccgattgcgcgctgtgtggacggcgtatacgagctcgaccttgcgctgcgcaacaatattacgacggaaaaatatccgctcggcgtataccacccgcacgacgaatatcatcacatcaagaaagagaacatcggcctcattgaagttatgggtctcgcggttttgccgtccagactgaaagacgagctgaagaccctgaaagatgtgatgctgaaaaacggcgatgtttcaagcgtggagagcatcgcaaagcacgcggagtgggcagcgcaggtgaagcgcgaccacccggaaatgaacgaagcgaatgccgagcacatcttgcagcaggaagtgggaaaggtatttgtaaaggttctggagaacgcaggcgtctacaaatgcacggcagagggcagaaaagcgttcagaacgtttgtagaaagcgtacgctgaatcgaaaataatacgataaaataaggaatccatcgtatgcgtgaaagcgatacggtggattccttttaattcgtgatgaaacagcttcaaatttctttgccgcagtatggacggattgcgtttacgtgtcctttaccgtgtctttcagcggttcgcttttcgtgccgtcttcgttgaccttctgcatgttcgggtagacgagtgcgaggtagttgtcatccaagtgcttatcgaggaacatttggaacgagcttgtggcggggatgccctcggcgcgctcgttggcgcgggtcagcgcggcgcaggagatgagcccgtcaaacagcatgaacgcaacgagcaaaatggtgaggatagcgcccgggcgcttcgggattttttcgatcatgcgcgacatggcggggtaaatttctttgatccagataaggccgagcgtgccccagatgagcgcgaacatcaagtttgtgcggccgtcaatgttgaacggcgtgccgctgtaatcccacgaaacggtgccgaacagcatctcctgtccccaactgcacaggtactcgaacgccgcaccgatgatgccgctggcaacaaaaatgacgatgtcgtcctgcttgtagagcttatacaggcacagcgtgatgatggctgcgccgccgccgtaaatgggctggaatgggccgtacacaaggccgacgcgcaactcaatctggtgcgcgatgaagaacgcccagcattcttcaagcacaaaaccggcaaggcagccgatgaagaagatccagaagagttttgtgaagttcatgccgaacgcaaacgggcggtcttccgggttttcgaatgtagcttcatattcatagcggttgcgcttccagcgttcggcggagcgctttttgcgctcttccgtcgtgatgcggtacgcttttaattccttttcgtactgctcgttcgtcatatccggcgaggcgctcatgaagcggcgctttaagaagttcgatttgttgaggagtgccgtgtagttttcgtcggcggtcttctgtgcttcctgaagcttcttttgcaggtcgaggtcatcgatggcctccgctgcgccgatggcaccgccggtgacggcattgccgagggcgtttctcgcctcgcgcacgcggtctccgagttcggataagcgtttaaactggtgattcaagcgctgcacggtgatggacgtgatgatgatgtcgagcagcatgatgccgaggacggcatagaggatgacccagccgacggtgcggttgacgtagtgcagaagtgacgtgagtaccggcacaatgaacaccacaatgaacgagaagcacacgccgcgcacggtggcgacgggcacggaaacgtagcccttgatattccacttgaatttggagtaatcacgcaggcggatgtgcgttgttttgcgcagcagccacgcgaacgtgaattccacaaggaagcttgaaatcaggcagaaaaacagcgtggcaacaaacgacgtctgccaatgcagcgccgtcaatgccgcccacggcagcgcaatcatcaggccgtactgcgggcagtacggaccgttcagcatgccggggtttttgaattttcggtataccatgccgatgtaccccacctctgcgacccagccgcagaaggaagcaagcacaaagtaccacagaaaaagccagatcttatatgccatgcgtgcatctccttaaaccatcgagcgtcctatgtatatctcggaaaagtataaaacagtatagcatatttcacggttttcaacaatacttctgcaagaaaaaactgtcggaaaccgcagcaatatcggaaattttgaggggaaaacaaacgactcctaccacgaaaacctgcccgtactgcctgatggatgacgtgaagatcggcgcgacgaaatgcccgcactgcgcatccgtgcttccgccggaagacgaagaggaaaagaaggacgcataatatctcgcttatacatacgcggctccacggtgctttcatgcgccgggagccgtttttctttttatcgtccgaaggactatagcattcgccgacaggcgaatataatgaaggcgcactttcggagagaaagtacgccttgaaaatatgtattcttatgtcttacttaaagcaaaattaccagccgaggcccttgaggtaatcgcggctcatcttcacggcttcgagagcgggggtgtcataagactgatcctgctcgacaacgacccacttggagccggcttccagtgctgcatcgagcaccggcggaatgttctgcatgccgtggccgaccggacggaactcgaacttgccggtttcttccttcttctcggtctcaatgccgatgagctcgtacatgttggccggcttaccttccttgtagaagtccttgaggtggacgactggtgcgcggccggcgtacttcttgatgtaatcgaccggctcttcgccggcgaccttgacccagcagatatcaagctcggtctggagcaggtcagcgggaatctcggtatagatataatcgagtgcatactgaccgttcggcatctttacaaactcgaaatcgtggttgtggtaaagcagcgtgatgccgactttcttgcaggcttcgccgatcttcttgaaggtctcaatgttcttgaggaacttctcggtgcccggacgatcttcttccatcagatacgggatggcgatgtactgcatgccgatctccttatactgtgcgaccgtgccttcgatatcggcttcgagctcctggaacggaacgtgtgcggaaagcggaacgaggcccacttcttccaaaatcgccttgacttccgccggcttcatgccataaaggcctgcaagctcaacgccgtcatagcccatgtccttgattttctgcatggtgcccttaaaatcgcgctcagcgtcatcgcggacagaataaacctgtaccgctacgggtaaagttttcatggtgaactcctcctaagttaatggattgcttttctttatcatacagtcttttttgtgaaaaatcaatccgtgattatgaaaaattcctaaatattcgcaatttcggagccgaaacaattcaaaacggcgttatcttgcagttcatcttgcagttcacgtctaaaagtagtataatcatgcgtatcgataaacggaaaattcaaatttaaggaatgaagaaaatgaaacgaaatttacgcttttattttgcgctgatgttcgcccgcggtacggcgctggttttaaagctcatcgggcgaaagggcacgtccatgccgggctcttgggctattattctgtgcccggattttatcgggcgcatgccgaaaccgaagaagatcatcggcattacgggcacgaacggcaaaacgactgtctcgaacatgatcgaggatgttttggaggataacggcatcgagttcatgtgcaaccgctccggcacgaatgtcgcgaccggcgtggcatctacgctcattgcgaacagtcactttttcggcaagccgaagtgtgaccttgcggtgtttgagcttgatgagcgctctgcgccgaacatttatccctacatgcagccggacattgtgctgtgcacgaacattttccgtgattcttataagcgcaacgcgcacgcggagtttatcctcgacattctgaataaggaaattccaaagggcacaaagctcgttttgaacggcgacgacccgctttgcagttccattaagcccgaaaacgaccgcgtatatttcggcatcgaccaccttgacacggacaaaaaggaatgcgacaatatcgtaaatgatgtgcctgcctgccccaaatgccacggcccgcttgtgcacgacattgtgcgctaccatcatatcggccgtgtgcactgcgaagcctgcggctaccgctcgccggacatcgactaccttgcaacggacatcgatacgaaagacatgaaaatgaacgtggcggagggcggcaaaaaatcggaatacccgcttttgaacagtacgaacatcaatatttataacgcccttgccgccattgcgacgctgcgtgaattcggcctttccgaagaaaaaatccgcaattccatggagaaaatgggcatcagcgagacgcgttactctgaaaaagaagtgaacggcagaaagtacattctacaccttgcaaaggggcagaaccccattgcgtgctcccgtgcgtttgaaaatatccgtaacgcgccgggcaaaaagtccgttgtgatgtttctcgacgactacttcgatgcgcgccacaccgtggagaacaccgcgtggttctacgataccgattttgagtttttgaatgacccgagcatcgtgcaggtcgtcattgccggtgcgcgccaccacgatacgtatgtgcgcacgcttctggccggtgtgccggcggagaagatcgtgcacatgcgcgatgaaagcgatacgcctgcggcggtctcgaaagaagcggacacagtctttattctgtacgacgtatataccattcgtttggcaaatgacattcgcgataagatgatcgaacgtgagaaggagggcgagacgaaatgaaaatagaagtccttttcccggaattctgcaacctgttcggcgacgcgtacaacatggtctaccttgaaaaaacgctgccggaagcggagtttatccgcacgcaattcagcgacgatgtgcgctttaccgaagaaaaaatgaaccttgtgtatatgggtcccatgacggagcgtatgcaggagcaggtcatccgcaagttgatgccgctgaaggagaaaatccaaaaagccattgacgacggcacggtgttccttttcacgggcaatgcgctcgaaatcttcggcgattacattgaaaacgaggacggcagccgcgtagagtgccttgggctttatcgtttgtacgcaaagcgcgatatgatgcaccgccacaacagcgactttgagggcgaatttgacggcaatgtcatcatgggctttaagacgcagttcacgatggcctacacgccggacgaatcgcacggcttgttcgtgaaaaacaaaggtgtggggctcaatataaaggcgaaatacgagggtatccgcgtaaacaacttcttcggcacataccttgtggggccgatcttggttttgaatccgccgtttacaaagtatattttgaacctgatgggcgcgggcgatgtgaagcttgcgtttgaagcggaaaacatggaggcctacgagcagcgcaagaaggattttgccgagaaggtacactgatggtgcagcacgaaattccgccggtgttcgacgaaaacagccgcgtgctcgttttgggctcgtttccgtctgtgcagtcgagaaaagcggcgtttttctacgggcacccgcaaaatcgcttttggcgcgtcttgagcgcggttttcggtgaaccggtgccgggggatgtccccgaaaagaaggcgcttttgctaaagcataaagttgccttgtgggacgtcattgcctcgtgcgacgtgacgggctcggctgacgcgagcatcaaaaacgttgtgccgaatgatctttccgtgattttatcgacagcgaacatcacgcatgtgtgtacaaacggtcaaatggcgcacaagctgtatcaaaaatatctggcgaaagagatcgatttgccggaaacggttctgccgagcaccagccccgcgaacgccgcgtggagcttggagcggctgacggaagcgtggaagattatccggtcaatttaatacggcaagcacgcggctttaaaaaccgcgtgcttttttcacccattttttccctctccatataataaaatcaggagggctgaaaatgaatgatattgtattttatgcgttgttggcgacgctggggacatggctcgtcacggcgcttggtgctgccacggtggtgctgtttaaatcgccgaaccccaaaattctcaatttgatgctcggctttgccgccggggtgatgattgcggcgagcttttggtcacttttgcagccggccatcgagcgcgcggaggcggcgggaagcatgcctgcgtttttggtggcgacactcgggtttctctgcggtgcattgttcatgtggggctccgataaatgcgtgacctacgcgcagcggcgcttcgctttggcgcagggcgagaaaaacgcacggctgaaccgcatcattttgttggtactttccatcacgctgcacaatatcccggaggggctcgctgtgggcgtagcgttcggtgcgctgaaaaacggcggctatacgccggaagcgctgatgggtgccgtgacggtggctgtgggcatcggcttgcagaatttccccgaaggcgcggcggtctcgctgcctttgcgccgtgaggggtgctccagaagaaagagcttttttatcgggcaggcttccggctttgtggagccaattgcgggcgttttgggtgctttgcttgccgtgtacattgaagccgttttgccgtttgcgctgtcctttgcggcgggcgcgatgatcttagtcgcggtgcacgagctcatccccgagtgtcagcgcaaccaggaagcgcagccgtatgcggcgacaatgggcattgtgacgggctttgcgctaatgatgcttttggacgtgatgctggggtgaaattttaagatagaataaaaagtccgaaacacggttcaggtgcttcggacttttgccgttttgttgtattttacgcctttgcgggttctgcggcggggacggtgagcagctttttccagcggccgctgtaatagtagatgagcagcgggatgatgcccagaatgtagccgatcggcgcggcaaaccaaatgcctgtggtgccgatccagatgggcagaagcaacgagagaccgatcttgctgcacagctccacaacggaggagaccatggaaatgttgattttgcccatgcccttgacggtgctgttataaagccagatccatccgaggaacgggaagaaccacgcctgaatgcggatgaattcgagtgaatacgcgatgacttcggtctcgttcggcttgacgtacagcgagacgagcggctcagaaaaaatgagtgtcagcgcaccggcaaaaatgctcagaccgccgacaagaaggaagatttgccgcacgccaagcttgatgcgctctgcgtttttcgcgccgaagttctgcccgacatagacggaaaagccgaacgagaaattgctgaacagcatcacggcgaggttctgcacgttgctgccgacggtgaacgccgcgacgacgttagagccgtagctgttgatgacgcgcgtaatgaccatcatgccgacggaaagaaacaggctttgcagagccatttgcgcacccatgccgaatattttaaggctgacgggcatatccgggcgcagggtgtggcgcttcggcatcagatcggggtatttgcggaacatgacgaggatgcagatggcggcggagatggcctgcgagccgaccgttgcaacggcgacacccgcaacgcccatgttgagaccgatgacgctgatgaggtcgaggataacattcaaaatggagcacagaatgaggaaatacagcggtgttttgctgtcaccgagtgcgcgcaggatagatgccgcggcgttatacgcaaactgtgcgatgccgcagccgcagacaatctgaatatacagaacggacatgtcgatgacgtcttccggcgtttttaaaagctgcatgagcggccgcgcggcgaaaacgctgatgagacccagaacaacgccgagcaaaagggtgatccatccggaggcgacaattcccttgcgcacgcggtcggtgtcgtttgcgccgacgtattgcgaaagcacgatggaaatggcactcgttacgccggttgcaagcagcaggatgaggcccgttgtggacgtggtggcaccgatggcggccagcgcgtgcgagccgacgaagcggccgagcacggcggagtccaccatggaataaagcgactggaaaatactgccgatcatcatgggcagcgcaaaacgaagcatcaggttgatcggtttgccctgcgtcatgtcgatggcaccggacggtttggacatgatacaacaactccttaaaaaagtaagattaaggtaaaccgttccgtagaaaataagggtaaaccgcgtttgtagaacctcttcgctgcgtgttagtttacaagtatcattgtaccaagaaagcaacgcgagttcaatgaacggtttacccaaatcaacgggaaaaatatttggttatttttgccaataattaaatgttaaatgatggaataggtgaacatttcgtagagcagcgcggtgccgatgtcgatctcctccggtaaaagcgcgcgagcgaccagaatttcatcgtgcgtgtcattgtccgttcggcgcaaaacggcgtagtcgccgtcgatgctcgccacttcgtattcgtaagggcccattataccaccgtaccttctttaacaaatgtggcggcgtgctcacgcgcggcctcgtagtcctgcgctaaaatgaggtaagctttcgtgaagcgctttgcgttcgggtcttccggctcaatggcgcgctccattaaaagaacaccgtccgtttcggagacctcgtgaaaacccatctttttgtggaatgccacggcggcatcgttcggcagattgatgtgcgctgtaacgcggcggtaatttgcatagtgcatgatgtccagcatcaggctgtataaagacgtgcccacgccgctgtgcagacatttttcggagacgtacagctgtgcgtcggcggagaacaggtcgtccttcggaatatcgcggtcggtcaaaaaacagaatcccgccgtctggttgttgatctccgtcagaatccacatacggccgtatgtataggtgtcgatgcgctgcacgtactcggcgagcgtcggcacttcggtgtcgggcgtgtagtgcgtcttttcgacgtagggtgtgtaaattttgagcatggacgggccgtcccactcattcgttctgcgtactgcaactctgaaatcactcatattttcagttcctttcgctcataacttctgcatataggggaatagacggtgcggcaccggggcgcgagaccgcaatggcagcggcttttgccgcgaggatcagcgattttttcggcgaaagcccatccagcataccgcgcatgaaatagcccgtgaacgtatcgccggccgcggtggtatcgaccgcacggacaagctccgccggggcaaacgcgcgcttatcttctttggcgtaccacgcgcctttactgccgagcgttaagactgcggcggcgtgtgggtatttttgaaggagcttatccaaaatagcggtgggaatctttgtgccggtcagctgttcgccctccacttcgttcaaaacgaacacggaaacgagcgacagattgcactttaaaacgttttcgttcatcggggacggattgagccagatctccatgccgcgcgcatgggctttttcgagaatatacggcagcgcgctgatctcgttttgcagcagaagaatgtcgcctgcgccgaattgcgcaagcacgcgatcggcatatgcttcatccacagccccgttggagccgccgaaaagcagaatggcgttctgtgcctctcggctgacctgaatgacggtgtgcccgcccggcatatcgcgcgtttcgatgagggaggtatctacgccgttttggttcaataaatcgcgcaggtgctcgccgtccgtgccgatgagccccgcatggcagacggaaagccccgcccgcacaagcgcaatggactggtttaaccccttgccgcccgggaacacggtgcggctttcgctttgaatggtctcaccgccctgcaaaatgtggtcgaccttataaacatagtctgtattgagtgagccgaaattcaagatcctcttcaaggttttgcactcctctgtttcaaaatcaatacaagaatagcacgaacaaagcccgccgtcaaggaaagcaggacaaaagaaaaaacgcaaaaacctaatatttcagcggtttcgccaaggcggaacatattcacaaaacgcgcgaaaagtggtataatatttcggttaacgagcaaaccgagtttttaatccgttttttgccgtatcccgcgcatgcaaaacggcgcggccggttttgaattttttgaagcagtttgaagttaagaacgataaagaaagggattgataaagatgggaaaaagagagaatttgcgcaacgtagccattattgcacacgttgaccacggcaagactacccttgtggaccagcttctgcgccagagcggcgttttccgcagcaacgaagccgtaaccgagcgcgtcatggactccggtgatttggagcgtgagcgcggcattacgatcctctccaaaaacacagctgtcatgtacaatgacatcaaaatcaatattgtcgataccccgggccatgccgatttcggcggtgaggtggaacgtattctgatgatggtagacggcgttctgctgcttgtcgatgcgtttgagggatgtatgccgcagacgcgcttcgttttaaagaaggcgcttggtcttggcaaaaagccggtcgttgtcgtcaataaggtcgaccgtccgggcgcacgtccgcttgaagtcgtggacgaagtgcttgacctcttcatcgagcttggtgcagacgaagaccagctcgatttcccggtggtctacgcttccgcacgtgacggctacgccatgaaccagccggacgaaaagggcacggacatgaagccgctgtttgaagccattataaacgatgttccggcgccggagggtgaccttgacggcccgacgcaggtgctgttctccaacattgactatgatgagtacgtcggccgtatcggtatcggccgtgtggagcgcggctccgtaaaggtcggtcagaccgttaccatctgcagcagcacaagcgacgaaaaacgcaacgcgcgcattacgaagctctaccagtttgagggcctcaagcgcgtggacgcagagagcgcagagctcggcgacatcgtggccgtttccggcatggcagacctcaacatcggtgagaccgcctgcgacccggagcacgtggagccgctgccgttcgtcaagatcgacgagccgaccgtttctatgatgttcatggtcaacaattccccgtttgcgggccgcgagggcaaatatgtcacctcccgcaacctgcgcgaccgcctgtttaaggaggtcgaaacgaacgttgctatgcgcgtggaagagacggattccgctgatacgtttaaggtatccggccgcggcgagctgcacctctccattcttatcgagcagatgcgccgccagaactacgaattccaagtctcccgcccgagcgttattttcaaggaagaaaacggcaagaagctggagccgatggagcttttgatgattgaagttccggataactacgtcggcgcggtcatggaaaagctcggcaccagaaaggcagagctgctcaacatgggcacccgcgacagcggcaccacacaccttgaattcaagatcccgtcccgcggcatcatgggctaccgctccgagtttcttacggacacgaacggcaacggcatcatgaaccatgtgttcgattgctacgagccgtataagggagatattcagcagcgcagcaccggttctctcgttgtacacgagaccggcgagtccacggcttacggcctgttctacgcacaggacagaggccgcctgtttatcgggccgggcgtaccggtttacgagggcatgattgtcggcagcaacccgaagggcgacgacatcgtcatcaacgtctgcaagaagaagcacgcgacaaacacccgtgcttccggctccgacgacgcactgaagctgaccccgcacaccgtgctctctctggagcagtcccttgagttcatcgcggatgacgagcttgtggagatcacgccgaagagcatccgcatgcgcaaaatggtgctgagcaaagagctgcgcatgaagcaggctgcgaaaaagaagtaatttataaacctgaccaacggaaaagacacacggagagccaatgaatatcgttattttggatctggagtggaacggtgcgtacagccgccgtctccacggctttatcaatgagattatcgagttcggcgctgtcaagctcgatgcacaactgaatatcacagaccggttttcctgctttgtcaaaccgcaggtgacaaaaaagatcagcgcgattatctcggacctcaccaacattacggatgcgaatcttttggacgcacgcccgtacatgcaggtgatgagccgcttcaaaaaatgggcgggcgactgcgtgattgccacgtggggcacgtcggacattctggcgctgattgaaaactgccgctatttcggcggcggggagaccgttccgtttttgcagcgctatgtcgatttacagcaatacgtggaaaagcgccttggcgaggacggcaaggagcaacttgggctttccaaagcggcagagttgctttccattgatgacggtgcgctcgaccaccaccgcgcgctcgacgacagcgtgctgtccgctatggtgctggagcgcatttacacaaaggatacgttccgcccgttcattcaggactgcaaggacccggagttttacagacgcatcacgtttaaaacaacgtatatctgtgacgtgaacagccctttgatcgaaaaggagcatctgcatttcacgtgcgaaaaatgcggcggcgaagcaaagcgccgcggcaaatggactgtgaaaaacaagagtctgcgcagcacgtttaagtgcgaaaagtgcggctacgaattctgcggtcagctgcgcgtgaagcagaagtatgagggtattatcgtgagccgcaaatccattccgctgccgaaaatcgaaaagccgcgccgcgccgaaaacgcagacatcgccgatatgcgtctgacaatcaaggaaaacggtgtgggactgctgacgtttaaggcgtgggagaatatcccgtaccttacgcactgcttctccacgcgcatcggcggcgtgagtgaagaagagtttgctgctatgaacctcggcttcaaccgcggcgacagcgatgaaaatgtaaaagaaaatttccgtcttatcgctcaagcggcgaatatccctgtagagaatataacggcgggcgcgcaggatcaccacacgaacgtgcgccgtgtcacgatgaaaaacgccggcacgggtatttggaagccgaaggacatggaaagcgtggacggtcttgtgacggatgagccgaatctgccgctgctcatttacgcggcggactgtgtgccgctttacttctacgaccccattcatcacgccattgggctttcgcacgccggttggcgcggcacggtgaacggtatggcaaaagctaccgtagagaaaatgcaggaggaatttgatacccgccctgaggatttgctcgcggccatcggtccgtccattgcaaaggagtgctttgaggtggacgccccgtgtgcggaggaattcctcgcgctgcccgacagcgacaaattcgtcacggacgacggcaacggtaaattccacgttgatctttgggcgtgcaaccgtgcattcttattaggtgcaggtgtgctgcccgagcacatcacaacgggcggcgtgtgcaccatgtgcaacagcgatctgctgttttcacaccgcgtgacgcgcggcaagcgcggctctaacgccgggttcctgatgctcagggaacaaaacgcatgagcgtttgcacactgtgcccgcgaaaatgcggtgttgaccgtgaaataatgcgcggctactgccaaagcggcggcaaaatgcacattgcgcgcgcgaagctccactactgggaggagccgcccatcagcggtacgcgcggcagtggcacgatcttttttaccggctgctcgctgcgctgcgcgttttgccagaacagcgagatctccggtgaaagcctacacggcaaggatttcacggttgaggaattcatcgagacgataaaaaaactcgaagctatgggtgcgcacaacatcaaccttgttacgccgacgcactttgcatcgcaaattgccgaagcgctgcgcatctataagccgcgcgtgcccgttgtctacaactgcggcgggtatgaatcggtcgagacactgcgcatgttagaggggctcgtcgacatttacctgccggatttcaaatatgcggacgacgatctcgccgtgcggctttccaatgcgccgcactactgtgaaacggcgcttgctgccattcatgaaatggtgcgacagacgggcgaaaatgtgtacgacgaaaacggcatgctgcaaaagggcgtcatcattcggcagctcattttgcccggccacacgcgcaattccatgcaggcgctggagctcatcaaacagcattttccgggcgtgcccgtgagcctgatgagccagtatacgccgatgggacgtgttttgcgcgagccggaatttgcggacatcaaccgccgcatcaccctgcgggagagccgcaaggtacaaaattatatgttggaactgggtttgcccggcttctgccaaaagcgcagcgccgctggcgaacgttatataccggattttacacagtttgacacggtcaacttaggggaggaaaaatccatgcagacaacgatccagcttctttcaccgatggaaaaagtcatggcgcaggaagaaaagacctttgcgccgtacccgaaggcgagcgctctgcgcggagaagagaccgcgtttcaggccatcgtcacgggcgagggcgagcactacattgaggtgcgcaccgatgcacccgttaaagtggcggtgtaccgcgagggctatgtgccgtgcacgctttccgcgtacccggacaggttcgatgacgactacatcacaacagaaccgagcacgttcccggatgtgctgtatcccgtcacggacggcgcggtgaacgtcaacggccgcgaggtgctgtgggtgagcctcaaagtgaacgacgatgccgcgggcggcgattaccccgtggagatcagcgcaaacggcaaaagcgaaattttccgtttgacggtcgtgccggtcactttgccggagcagaagctcacgttcacgcagtggttccatggcgactgcatcgcagcgcgctacggcgtggagatttacgcaaaagagcactgggcattgttagacaagtatatgcgtatggcggcggaacacggcatgaacatgatcctgacgccggtgttcactcccgcgctcgataccgagatcggcaaagaacgcccgtgcacgcagcttgtggagatcacaaagaatgacgcgggttatcattttgatttcgcaaggcttgcccgctgggtggaaaccgcaaaggactgcggcatttctaagtttgagatttcccacttcttcacacagtggggtgcaaaatgtgcgccgaatatctacgtcaccgaaaacggcgaacgcaagctgaaattcggttggcatactgcggcaaccgacccggaatacgcggcattattgcatgcgctgctgccgcagctgcttacattctttgaagaagtaggcgttgaaaaaagtgaccttatgttccacatttcggacgagccgagcgaggagcacaaggcggactacttaaaggcgaaagccgttgtggagccgtatttgcccggctgtattctgcgcgacgcgctctcgtcgtatgattactacacggagggactcgtcaagcaccccgtcgtcgcgacgaatcatatcacgccgtttatcgaaaacgatgtgccggatctgtgggcgtacacctgctgcagccagtgcgtggacgtgggcaaccgtttcctcgcgatgccctcaaaccgcaatcgcattttgggcgtgcagatgtggaagtatcacatcacgggcttcctgcactggggctataacttctggaactcgcagctctccaaagcggttatcgatccgttcaaggtgacggacgcaggcggcgcgttcccgggcggcgacggattttccgtctatcccggcgaaaacggcccgctgccgtcgctgcggcaaaaggttttcgccatggcgctttatgatatgcgcgcgttgtcgctcgccgaagaaaagctcgggcgcgaaagcgtcttaaaactgctcggagacggcgaaagcatgacgtttgcaaactatccgcgcacatcgtcctatctgcctgatctgcgtgagcgcgtgaacgaagccatcggaaatgcgtgtaaatgaattcattttttaaagactgtcgtactgtttcggtgcggcggtctttttttctgaaatttgctctacccatatttgtcgttttgtgctatgatgaatagaaacaaggaaaggaatgaccgaaatgttaaagacttctgaaaccaccgaaaaactgctgaagtttatcgacgcttctccgtcgtgttttcatgcggtgaaaaatatatgtgtaatgttggaagatgcgggctgcattcgcctgcttgaaaacgaaacctggacgctcgaaaagggcaagcgctactttacgacgcgcaacggctcctctgttttggcgttctccgtgccggaaaactataacggcatgcagattgtctccgcgcacagcgattccccgacgttccgcgtaaagagcggcgcggagatcaccgtagagggtcactacaaaaagctcaacaccgaaggctacggcggcatgatcctttccacgtggtttgatcgtccgctgtcgcttgccggccgcgccgtggtgcgtaccgaaagcggcgtaaagagtgtgcttttgaacattgaccgcgacctgtgcatcatcccgagccttgccattcacatgacgcgcggcatggcagaccacaagttaaacccgcaggtcgatctgctgcccttgctcggcggcgaaaacgccgattataacgcgctcatcgcggaagaggcaggcgttaaaaaggaagacgtcatctcgagcgatatgttcctctatccgcgccagcacggcgttgtattcggcatggagaacgaatttattgcatccccgcgcctcgacgacctccagtgcgcgttctccgcaacggaagcgtttttgaacgcggaaaacaaagaaaagctgctcatcagcgccgtgttcgataacgaagaagtcggctcgctgacaaagcagggcgcgaattccacgttcctcacggataccgtgcgtcgcatcgctgccgcgctcaatatccccgaagcggagtggctgcgcaaaatgccggatagcttcatgctttccgccgataatgcccatgccgtacacccgaactacacggaaaagtgtgaccagacgaaccgctgctacttaaacggcggcatcgtcatcaagtacagtgcaaaccagaagtatacgacggattccgtttccgccgccgtgttcggcgagatctgccgtaaggccgaggtgccggtgatgatcttccacaaccgctccgatatggcgggcggctctacgctcggcaatatctcaaacggtcatctgtcgctcaatacggtcgatatcggcatcccgcagcttgcgatgcactcctgcgtggaaacggcgggcgaaaaggacaccgcgtacatggtaaaggccatgacagcgttctataatgcggatatccgccagacggcagacggcatgtacacgttttaagttgcaatcggcataactctcttgaaaggaacggatataataatgtgggcagatgaagcggtgttttaccagatctatcccttgggctttaccggtgcgcccatgccgaacgacggcgtgtgcgtgaaccgcattcaaaaggtcaaagggtggattccgcacctgaaaaagttgcatatcggcgcggtgtatttttccccggtgtttgaatcggacaaccacggctacgatacgcgtgattttacaaaaatagactgccgcctcggcacgaatgaagacttcaaagccgtgtgcgatgcgctgcacgaaaacggcatcaaagttgtgctcgacggcgtgttcaaccatgtgggccgcggcttttttgcgttccgtgacgtgcaggagaaaaagtgggactctccctataaagactgatttcacttgaatttcgacggtaacagcgcctataacgacggcttttggtacgagggctgggagggacattacgagcttgtcaagctcaatctctataaccccaccgttgtcgagtaccttttaaactgcgtcggcagatggatcgacgaattcggcatcgacggcctgcgtctggacgtagcgtacatgttgaatgaagatttcatgcgccgcctgcgcgcgtactgcgatggcaaaaagccggagtttgtgctcatcggcgagatgattcacggcgattacaaccgcatcaccgcagacggcctgctgcacagcgtgacgaactacgagtgctacaaagggctttactctgcgttcaattcgatgaatctctttgagattgcgcattcgctcgggcggcagttcggcccggagccgtggacgctgtaccgcggcaagcacctgatgaacttcgccgataaccacgatgtaacgcgcatcgcgagcattttaaacgacgaaaagcaaatttacccgctgtacggcgtgctgttcgccatgccgggcattccgtgcctgtattacggcagcgagtggggcgcaaagggcgaaaagcatgagggtgacaacgccctgcgcccgtgcttcgatgcacccgtcgaaaacgagctgaccgcgttcatcgaaaaactcgcgaaggtgaagaccgaaagccgcgcattaaattacggagattataagaacatcaccattcagaataaaaatctgctgtttgagcgtcattgtgatcatgagacggtgtttgttgccgtcaatgcggaaaacgcgccgtgttccatagacgcccgcggcgagtacaaagcggtcgattttttaaccggcgaaacaagcgacatccacggcagggtggagctgccgccgtatggggtcaaatatttgaagctcgtataaaccgaatactttaaaaccggtgtattttttagaaaaagcagatgtgtcaccaaaatcggtagatacatctgctttttgtcgtgtttatggcgtgtttatcccgccttctccatttctgtcttcaatcggtgcaaaatgcgcttttcaagccttgagatgtacgactgcgaaatgccgagtgcatcggcaacttccttttgcgtgtgctccttttgccggttcagcccaaaccgcagctccatgatctgcttttcgcgcgggtcaagcttttcaacggcacggagcagcgtttgcttttccgattcctgctcgatgccgcgattcacaatgtcggggtcgctgccgagtagatcggagagcaggagctcgttgccgtcccaatccacattcagcgggtcgtcgagcgagatctcgtttttcagctgcgccgttttgcgcaggtacatcagaatctcgttttcaatgcaccgcgaagcatacgtcgcaagcttgatgttgcgctccacgctgaacgtatttaccgctttgatgagcccgatggtgccgatggaaatgaggtcttccacgttcacggcaggcgattcaaattttttcgcaatgtacacgacaagccgcaggttatgcgtgataagagggtcgcgtgcgttcggttttccgtcacggatgttctgaaaaaccacctgttcttccgctttcgtcagcggtggcggaagcgtttccgggccgtttatgtagtggcaggtgtcttcgttcagctttgataaaaagtgagcaaaaatttcgcgcatgcgggtgagaaaatcgtgtttcatgggatgtcctttccgggttttaaaccctgtatctgcgcggcgtcacacacggcggcgccgacgagcgcctgaaaactccctacggaaagcgtgcggtcggtcacggccacccaacattcgattgatatgcccgaaagcgaagccgcatccggccgaaacgcgggcaaaacaccgtccgctccgagtgaagaaaacgggatgagccgcatagaaacagcattttccgtgctttgcattccgaaattcggcggcaatatgacaccgagcgcacgccgatccgcaacgatggcaggcgtgccggaaaaaggctccgtcagcgtcagccccgtgtcaattttcgccggcagcgtgacggttttgccctgccgtgtgatggtcagttttgcgaaaaacacgtccggctcctttttgcgaaacaggcggtcaaagccgtacagcacgccgtaagagacgcacgtgagcaaaatgagcgtcaatgcggaaatgttaaaatacaccgcgccgtttgcgagcaaaatgccgtgtatcggcagaaaatacgccgcagccgtcaaaagtccggaaagcgccgcgccaaacaaaaacagcaaaaaaacggcttttaaaagctgcgtcatcggctttggcgcaaacgctgccgcgcacagcgcaagcgattccaacagcgccagcggaaacaaaacaacccccggcagtgcgggcagcagggcagaaagcccaaacaccccgccgagcacggaagcgagcaaaagcctttttcccgtaagcggcagccgcaaaaaacgccgtaccgcgctgagcaaaagcgcgtctatgtagaggttcacgatgaaaagcaggtcggcataaacggtcacgctttcacctcccgacaccagtatacatgtgggacaaattttgattctgtcacattgtgccgccgggaaaaattttcggaaaaggcggcggaacaacgcgtgctgtttgcgggttttacattgacaaaatccgcattgcctgctatgctgaaaatacttttggaggtggcgtttctatgaaccgaatttctgttttttacgagcacatggcagaagccatgaagcaggagaatattacattagatgaagtgtgcgcggcggtaaaacgctttggctttgacggtgtggagctcgacgcgaaccgcatcaaaaacgagggtgatgtaattttgcctgcgctgcaaaaagccggtctttgcgtgaacggcatttataattttttcgatttcggcagcgagacgggttccccggaaaacgaccgtgcggaatctctgcgcgtcatagactgctgcgaaaaagcaaactgcaagttcctgcttgccgtggcgggttttttgacggaggacgaaatggtgcgcggcagcgcaaagtatgaaacccgccgcctgcgcatggcggcatctttaacggagcttacagcggaagcggaaaagcacggcatcacggttgtcatggaggagttcgataaccttacggcgccgtactcccgtgccgatgagctcatgtggttcatgcagcatgtgcccggcctgcgctgcggctttgataccggcaatttcctttataatgaggaggacgcggtgaagagcttttccctgttccgtccgtacattgcgtccgtgcactgcaaagaccgcacgtttacggaaaacaccggcagtccatgcgtcacggtcgcaaaccgcaagctgtatcccgtggcggtaggcgacggcaatctgcccattgaaaaaatgatgcgtgttttgcttgactccggttacaccggctgctttgcggcagaacatttcggctccatagagcagctgaaatgcatggagcgctcggcggcgtttttgaagcgggtactcggggagaagtgaggctaacaatttgtaaattggagatactatggaaaatcacagaattttgattgttgaagatgatgaggctattgcgggtgcggtcagccgcatcatcgaatcttgggggcttaccccgcgctgtgtccgcgattttcgcgatgttctgcgcgaatttacggatttcgacccgcatcttgtcctcatggacatcaccctgccgttttttaacggctaccactggtgcagcgagatccgaaaaatatccgccgtgccgatcattttcgtctccagcgcgtcggaaaatatgaatattgtgatggcggtagacatgggcggcgatgattttatcgcaaagccgttcgatccctccgtgcttatggcgaaaattcgcgctgttttgcgccgtacctacgacctcggcgaccgtgtgccggtcattgagcgtaccagaaggcgcgaatttgaacacaggaaggcgtgcgctccactttttcaaaaaggtggtggccgtcgtggtcaaattctcaaaataaaggcgcataggcgcagaaagaggcccggagggtaagtttataccttccgggccttttcgttcgtcctgcgggcactcagacgctcacaggggttattctgttgttattcttccgctgctggtgcttcggctgcgatctgctgcactgctgtggtggcgatcgtgctcgctacacttgccgccgtcgctgccgctgtggtagtggctgccttttcaacctctggcactttaatgtcccggcatacctgctcgatcttggtgtccagccatgcgtcgaagtcgccgtagatttcacccagagcctttactgtggtgtctccgaggatctccagcaccttgtcccgcgccttctgaaatgcttccagctgtttttcttttgtgaaaccgccttccgctttcagggtgtcaacgaaggtctgagccgtgtatgttacggcctgctccacggcgtctgttgccagttcgatatacttcgaggctgtctcgctgtccagttcttcctcgatctgctgagtctggcggcgcaggagtgccaccagatagccgccgccagccgtgataagcaggcagaggatcggtacaaaagcgtctgcgatctgttctaacatttccatgttcgagtccctcctttgatattaaagcatgctgttgacaattttctgaacggctgcgtagttatacccggccgcttcgaggcgtttcttgcgatccgctccgtttccccacttacctgcgatcacctctttggcgatctctgtgttggatttcttgggggtatcgccggaagccgcggtgccgccgccgttggttgtcacaaaggcgtcgaagcctttcgttttgagcttagatacctgagcgtcagcatttgcctttttggaatacgccccggtctgcaccttgtaaagatttccgactttctttatgagcacctcgaagccagccgctttgagtctcgctgcctgagcgtcggcatttgctttctgtgagtacgcgccgctctggacatagtaaagaacggatccggagctggagctgccgccagtggatccgccgccggatccggagctgcctcccgtccccagcagagcgttgatcctgtcggcaagctcgccatagcgggagtagagccagtcaccggggcagctcttatttgcaaaccaccggtgcgcggtcagcaccatttcgttgctttttggcgtgtatgcgagagttttctctttgctacccagccacaaaaccttgtttttcccgtttctcttgcagatgtccgcgcagagctcgatcagcttttcgtaaacggccgagttcatagcgtaaggatctgttttgtcgctggcgcactcgatcgttacggcccgctggtcgttggagttgctggagctgcaccagctccggttacactcgtctactacgaggacgacgcggctgtccttgccgatcccgtagttacaactcgcttcgcgccccgccgggaagcaggagccgatcccttccgctgtgagctgccccgcaacgcagtggggcgtcagtgtgtcaatgctgtgtgtacgtttcccgctatggttcgggctttttacggtacagtttaccaatggactattactcatattgttgcctccttctgagggcgtggaagctacggctttcgcgtatttgtcataatacgtttgcccgtagctcgcccgtttgatttttaccgcttcggactgatcggccggtctttcaaagtcggtcagcaccttgtcgcttgcagccctcacgctggtagctgttttcaaagctgccaaaacagagggatagctttcgctcagctctttgtataaaaagccgagctgtgcctccagatccccgatcgaaacgccgagcgccctcacatagttgagcagcgcctccttccggctccagaacgtccactgtgcaacgccgtagcctgcggagtcatgcacaaagttggcatagctccctgagtctacggccgcggtgtatgtggcgtccgtaaagccgagctttttctcgtaagagttctggaggttctgcgggttgagcccgctctcggcgaacagttcccccataaggcccgccacgccgaagtcgttcgggatcttgcctttgaggaagttccacgccttttcctcgttgttttttcctgtcagtcccatgagtccctccttttttgttaataggtttcaaagctcgacggctccggcttgacgccgttcagggccatgagcttgatcttgttttctgcctttgccttggtgtaatagaaaccggtcgccgaggccatttccgcaaataccgccgggatcagataagccagcacggaggtgtccatggtgatccagatcatgcggcaggaaaagacggtgatcgctatggtggcgatacttacgcccagaaaaatgagctttgaaaactcaaccttcttttttgctgcagcggcagctcgcatttgctggatctgctcccggagctttttgttttcttcggccagttgccggagctgtggatccggagctgccggatccacaacggcgtccggcccggtgtattcctcgcacatggtcgtcgcctcctattcgtaaatggaattgatcccctgtttagccagaaagtccttttgtgcgtgtttgactttcgaggcatactccagcgccgcgtgcatgtctccgttgcagtgagcgtcagggatccgctgcaccgctttggccgtggcttcgccgagcgcgatcgcggcgtttacgccttggacgaggtaaaactcttgttgctgccgtaagttttcgcgcctctccaagtcctcgcgccgggcttcttcctcggcctccctctttttgtcctgtttcttgatgttcctctcaataagccaaaagcaaaagccagttatggccgagggtatgctcgcggctatgattattgcggttacgtccataggttcacctcctttgcctctgcggccggttcttttcgtttgaaaactatatttttctcgatccacttctggagcccgtaggtggagcagtggctcagcataccgaagtagctctgcatggtggcgtccaccgcgtcgaagtcgatcaggcccgcctcgtattccttggcgatataccgcatacgcgccttcattttcttgacgctctgctttgtcggcttgcggtagccggggaagatccggcagcctacaaaggtgatcccgcgctttacgagtccgatcgttgtcttgccgttaagttcgaggtgcagcacattgttgaggtagtcctcaatttgcacccgccaccggttcagagttttggcgtccgggtgcagcagcgccatgtcgtccatgtaacgctcataaaagtgcgctttcagttcgtgcttgatgtactgatccagttcattaagacagacgttcgcgagcagctggctggtaaggtttccgatcggcatacccacctcaaagagccgctccgaaggtggcacctcgtcggctgtctttcccggaggaagcccgaagggcgtgtggtcgcagttgatgatcgtctccatgagccagagaaagccgtcctcgttcgggtatttgcgccgcaaaataccgagtaaaaccttgtggtctactcggtaaaaatactttgaaatatccagctttaagtagtgccagctcggccccggcttgcggtcaacgagtgtcgcccagtattgcagccggtcggctgctcttgtggtgccttttcccacccggcagccgtaactatggtagatcatgccattgtcgagctctttgtttacttgcagatatacagcccactgcacgacacgatccgggaagctcagcgccataatgaggcggcgctttggctccgaaacataaaactcccggtatcggcccaccttgtaagtgtgccagatcagggagttttgtatttcaattagattttcctccagcctcgcagagaaggccagcacgtcgctgcggtaccatttctcgctcgctgcttcgtggtatgcgttcagcagattttcccacgagtatatacgttccagaagggaaggcttttctgtttctttgatagccgtcactccttccatgtttttataaaaaggcccgcgtgtgacactccttgaaacggccgtttccctacggccgccacgccgcagggtcgcggccgcccttcacccgcataaagcaggaacggccagcctgcgcggtttgcccgccgcccccagtagttcaccggcgagctgcgcgagcgttcatctttggccttgtcggacgggaaatgcgtcccttttgcctttgtgctcctgcaaagccgtggctcgcaggacataagcaaacaaggcaagagcggagcggaagccgatgttcgtgttggagttggagcgggagttgttgccgttgaggtagaacacgcctgcgttcgtgccgttgttccagttgcccccgcgatacacgcagcgcccccttttatcacgacacattccccacgggcgtgttactcgttcgactttttccagccgcccaacatacgcccgatttcgttcagctccttgctccatacctcatggagccccggagagatcaggcgatcctccggcgaaactgccgtgtctacgagggagcgcagcacgtccagctttgtgtccattttgttctggagctccacccggcgttggcctctggcccggttcgcctcaatgcaaagctccagcatgtccatgaaagcggcggtcatgtgcttgcggtactcgaatttttccggctttcgcatgttgttggtgcgctcgcccacccggatcatggatcggacgatacgctgccggagttgtaggttgtccatgttgtttctccttactgtggtaaaggggcggctttggtgggccgccccttagccagattttcagattgccagattacccgatttccgggataaaagcggagcggaagccgacgcccgcgccggagctggagcgggagtagtcgccgctgaggcagaacacgcccgcgctcgtgccgctgccccagccgcccccgcgatacacgcagcgctcggctacgccgttgttccaccagaagtagtcgccttcgtagtcagcttcctgagcgccttcgtccgggagaagggcgagggagcggagcaggatcttggcggcgtttccgactgctgccgctgcggtaactttaccaaaggcgcagctgcggcttgcgtcctgagagcttgcgacggtcgttgtccactgccatgcaccgcttacatagtccagcttcacggtgctgccggagagagtcgcggagctgtcacccacttcgcactcaggctctacgagagagccgtcggccgcattgatagctttccagcacacgctggtcgtgttctgcgggttgtccggatccgctgcgtcgttgttggcgaggatctggagctcgccccatacaaggcggatgccgccctgccactcccacacgttaccgttcagatcccagataccgctcagagttttgtcgtggctccatgtgagcgggccggtgccagttgccactctggccgtggtgccttccggctgatcgctgtccgggccgtagaaggtcgtcgggatcgccttgtagttgctctcgcgggtgtcctttccgtagttgttatttccgtaaggcatgaagccgtttttcttgcaccagagagcgatcgcggcccactcggcgttggtggagaggtgccagcctgcgccctttgcctcgcagcgggagcgggcggtgtcgaagttgatacttgcggtcggatcctcgcccggcaggctgtacgctgccgcgatactgccgtcagtcagctgggtggtgtgtacgacattctggtacttggagtaccaaaagccggggatttcctgcccgtttacgataaaagccgggtgggtgctgtcgttgccaccggtcagcacgtcgctgttcttaaatttcgggatatacaccataacggacggcagatccgcgtcgtccacaaaaatttcattgttcgggcacacgcttttgagtgccagactggaaagatcaaagtttgccattgtcatatcctccttttttgcttattcaatgctccagagtacgagagtaacgtcgcccatgtcgagcgggttctgctctctctgcacggtgctgttcatgccgtcaccgcttccttctgccagaggctcggccccttcctctgtctggatcggtgtctcggtgtaggtggccgccgggatcattacctgcgccacataacgcagccccgactcggtgccgatcgtaaggtttccggctttgtctttgcaaatatccacggtcacgtcccagtctttctggtactttgccgcgttaatcatcagctcatagtcgccgaagatcaggcaggtgcccgtctgctcgtaggcaattttcgggcctgcgttcttttcaataacctttacattgttctgatctgccatggttacattcctcctttaattctcagtttgatagtggcgtttttggcgctgccgtcatacgccaccttgaagccgttcagcaggcggctgaaaatcttcacgtctccgacgtttccgtcatgctccagcacttcggcctccacggtgtagtccgtgaagtttcgggccgtattcagggctacggtttccaccgagttgttgaacgggaagctctcggagttttcgagagtgatcgtctgttcttcggtggctacctgatcggctgataaggaagcggagatcaaaagaagggcggtcgccagatgtgcgtcggaaatgccttcctccatgttgttgaaatgcccggcgctctggtctgtgccttcctgaatgacttcctctgtttcctcgtccaccactctgtcgagccagtacgttgcgttatacatgcctgtttacctccttccttttaggctgttacttcgtagatcgggatcgcgagcttaatcatggtgccctgtccctctaccttgttgatcgtgcgctgctgatatgcagcgacttccccgcgtgtgtcaatcaggcgcgaggcgtcgatcgtgcaggccacggagtccagtgtcgggaaggtggcgtagatcacaagcgtgtcaccttcgacgagctttttgttgatagctccccggtgccagttgccgccgctctgtacttctatcgcatggatcgagcggagccactgatccctccggtgccccatgaaggtgtcgtaaaagtagttcatgcgggtgtcctcctttcgatttattcaccgcagcaccgcgtcccgcatttcacgaagccatacgccacgctggagacttgcagcgctgtagctgctttgtttgtgacggctgcgccttttacgccgccgcccggcatggttccgcatttctgcgtccccgccttgataagttgatacaacgaaaaagccgccgccagattgacgccgactgtgtgctgcagcaccttccccagagttccgggccttggatatgtgccgcaagtttgcccggtggttttaggcagctcgtagggcagagcctcgtctgtctgctccagtttaacctcctgcctgagcactcgccccagtgtggcggtgtttgggtaggttccggcttcgcgggcgaagttgtagcggatcgcctgagtctccgcttcggcagtgatcccgctttttactatcgcgcccagcgttcccggtcgcgggtatgtgccgcatgtcagctccccggcctttgtgaagccgtaaaggtgcggcgtttcctccggatccgtttcaatgcttggcttcacgacaaagccgacggttgcgatccgcggacgggtgccgcattttacgaagttgtaccggtgcagcgaggtgtccagccggtactcaatgcccggatcaggcccttgctgccagaaatagaaaacgcccgcaaggtgcgagcgtgcgtttttcgcagccttcactgcctccacaaacttctcaaagttctgggcgtccgtgttggtgttcgttgtcagtgccacgaaggtgtaaggggagtcgtacatttcgtaccactccataacatagccctcgccgaagtaggcagagatcaggcgctcgacggcccactttgtcccgcgcttgcgcttgatctgctgggcgagcttgatcgtctctcttttttcctccagactcatgccggtggagtcgtaccagtcaatgtccagctcccacgccagctcgtcacattccggctcgttgaggttgtcgatctcgtcccacgtccggatcgtcgggatcctgctgccgggtggctgtatgagcttattcatagccttgctgagtgcgatcgctgcctcgtcgtcgcgcatgaaggcgggcaggagccgcacaaagtcaagatctgatattttcattcctgccatagactcgcctccttagtcctttactttatgggaaacggtcagcttcccggaaaattcggccacggtggtgcttggaagttcggtatataccggtttaatgatattcacgcgggtggctccggtcagcccttcctcccagtgagggcagaggatcagcttccgcaaatagtccgggtttatgtcttggtcgaggctggagccttgccagtaaatatactggtcgattgcaccgccggatccctccacattctccacgacttcggactcgctcgccttcgttgtccagtattccagctcaatgtcatacttgaatgttgtcggagcctctacctgcaccagatccgtgagcggccgcacgtcgtcggcagaacaggccgccagcacgtcggccagtatgtcctcgtctgggatttcaccaccggcgcatataggcacgatcttgacgcgcccgtacatgttccgggtgatctcgatctttacggtttctgcctctgtcagagccccggagagggagagcgtcagcagttcgtcgttatatgtggcggtgtagtctgtttccggcgcggcttccgctccgcttggaaggtacacagttaaggtttccggcaggagatttgcaccgccttggaaggcgtggccgtcatataccggcagtgtgcgcgtgacggtttccgtctcggactctaccaccgcgtcagtgacgagcgggtttgcggtcatggcccagtatttgtaggctttggccgggcccgctgtgcttagccggttctctgcttcccggatcctttcccggtatgcctcgtcgtcctcacggtcgccgcctcctgccgtggcttccgtgttggttacatagtcgatcaggggaacgtccgagacgtccacaatctgagagatctcgccgatcgctatgtcgttgtagtcggtgccgccgctttctgctgtggccgatacctccacatagaggctaccggcatagagcacgacggtggcgtcggtcaggaagtagtgaacgaagtcattcgtcacccggatcccggccggtatgacaatatttgacgctatggcttcgtttatcccgaagcgcagcgttgtggtggcgaaggtgggatcgaggcgtggggtgtcccggttttctcccagagcgtccagcacggatccgcgagcgtagcggagcattttctgcttgcaggcgtcgttgacgctgttatacacggccacaatcacctcggccatagcgtcgccgaagatccggcgctcgtcacccggatagagcggatcgttgactccgttttccagctcgctgataacagtttcatgcacctgctgggcgcttgtttctatgaattggagctcgctcattcgatttcctcgtcctcctttctttccgtgatattcacggtcatattaaattcaccggataaaacgccggagggatccgtgacgatttcctcagcgtttacccgtggttcgtaggtttcgagcacccactcggcgtcggccgctgccgcgtcggtggcgtttggctggtcgatcagagcaccgtcccggcccctgagcctgtcgtatgctacctcgccccgcacggttcgcagcaggttggccgcgcacacctgcgggagcccgttcccttgtgctctcatggcctccctcctttacacgagcgtgacttcgctcagatatacccagctgttgatcccgtccgggtgtccgagcagcaccttgttttggctttccttgatctggcttaccttatggctgcgctcttttacccagttcgggatcttctggccggttgcgtacctgctcccggttggctttacatagcagccgacggtgatcgtcttttttggcgctgcctgcacttgcgtgtttgccggtttgctctgggatttcgaggccgtgctggctttcacattcagggcggtggtgcttaccggcacgcttgtggtgtcgggatcgtactctttaaactcaaaggaaagcgttgccagtctcatgcgtccgaggtcgtcgatctcgacgttgctcacggacaccttgcggagttggagcttcggccccagcttcttgcctcccagataaaaataatttacttttgtgacaagctctttccagctttcgatctctgcccgaacgtccacacccgcgccgctgtgcagcacggtggtgaagctgagcgggaatagatccgtgcctcgctcgttggtggttttcttttcctctgtgctggtgttgttgtcagctacctgagaataggaaaaggccagcccctccagagcgacgacttttttctgagatacggcccatgtttttgagccccattttgccattgtcgccatattggcccctccttatgttggcctgctggtggtgccgctgccgggttctacacctccatgcctgtgcccggataagctcacgccgctggcgtttacgtctccttccggcacggatatggatccggccgtcagtccgggaaggtaagcgccccactcaccgtcggcccggccgagtagtagcccgctggcgtcgtcaaattcgacatacaccaccggtgtgcctttggtgaggttccctgtgctccctctgaggtgccacgggatcacgatcttagcggtcggtttggctccggcgtcggaggggagcacgcgggcggtgtttccctctatcccggcgattgttcccttgtagatattccccatttagtagccctccagcagatccctgaaatagattgttgacttgttccctacgaagtcatgccggactttgtacacaaagacggtaccgtcccacatgcttgcttttgtcgtttttagagtcagcaggctggcggctgcgtacccggtcattagagccttggaaaactgccccgtgcgcccgtatttattggcatttcggagtagccccttggcgaagcgggccgcctctgcgttactggtgacttggatcgggatctccggccgcagtatggcgctgtttgaagcgtcggctacatatttgccggagtagctcccacttgccacctcgcaggagccgaacattgtgtcgcggttgtcctcataggtaaagacgccgttttcgtccaccgtgaggccgcccgcgggttcctgctgctcaatgtagtgctcgttatatgcgagcagagagccgtcaaaaataagcatttgacagccctccagcatacaaagacgagaaaagagggaaaagtccccctcgttgtcttgtttgatatacgggtaaacctgatcttcgcacccgtagttcttgaaagtgaggccgtggttcccggcaaattcatttgccagttgaaggaagcgcacaccctcccagctctttgatttccggatctttgccgtttttggcatggacatggcccggatcgtaaaaagcccgttttccggtttcatggagtgtatgaacattttcccggtgtcgcttgcgccttctttgaagcgcaccgtgtcaccggctgccggttgccatttgctccatattcccttggtgtcattgaaacggatcacgagcgtgtcggcctgcttttccgcgaacatttcatgcacgcagtagttcaccgacacgtcgttgtatatatccgtcccgttgtagtagaaattcacgaagcgtccagctccgggatttcttcgccccgacgccacggcggcagagtttccggcgtctctgcgtcctcgacgatcggcagccggagggccacgttcgcctcgaagatcagaacgtccgcatagtcggggttaaattcaataatgtagtgggcgagggtttcctcgttatacatttgcagcgcgagagagtcgaaggtgtcgccctcccgcgtgacgtattccagatagcccgttaccctacgcataaagcgccacctcccttgcctgaataaattcctccagccagtcgaaaaactctgcctcgtgcgctttgaggcgggccatgaagtcgtcggcgtcctcgccggatccttccgtctggatctgcgggctccatgtgaagccggaaaaatcgtagtaaatgacggtgctcgtgttgttggcgaggcttcccagagagaagtcgtccagagcgagcagtttcccggcggtgttcgtgagccccgcaccagaagttcctccagttgtgctggaggcgttgaaaacctcgtggatcaaagcgcttaatttgtcccatagcattttcaggggtacaacggcctcggctccggcttcaccgcctgcgaggaggttgtttccagaagcgccgaaaatggtcggctttgttaatataccgccttccttataccactcgatcccaaaatgcggaacacttgggggagtgagtgaaaaacttccgcttatgctgatatgtggaagttttagcttcggcaggctccacgaaaaattaaaagcgctttttattgcgttaattgccgagctgaccgcatttttcgcggcgtttattttgccgcttatcgcactctgaatactgttaaaaatattttgcaccgtactgagtgccccgttcagcgccgagctgatagctgaccgtattccattaaaaacactcgtgacggtgttctttgcagagtttacggcgttgctgattgtattctttatcgtgttccacattcctgtcgttactgaactgatcgcactccacaccgagctcgcaacgctttggatcgccgacgatacagtgctaaaaaccgactgagcagcttgaattttgctggttatggctgtttttatgccttcccatatcgttgaggctgttgaactgatcgctccccatatactgctggctgctgtgcttatggctgtcgttatggtagtgaaagccatgcgcgcagcttccattttgctgctaatccatccggcgattgcgtcaagagccccggagactgttgtttttatcccctcccatatcggtataataaaatctttacagttttgccatatcatctggaaaggcagggtgatgatttggaaagcagcggtaagaatttcgccgattgccattacacctacctgcacaacatttttaatggtttcccatgctcctgacaaaaaagaagtgattgcgttccagatatttaaaaaaatattctgaataccggtcagggtgttgcttataaacgaggtgatccccgtccatattcctacaaagaagtcgctgatatttccccagacagtttcccagttagtaccaaaccaccctaaaacggcgtcggctattcctcggatcacgttaatgtagtttgtgaacgtgtttactataaactcccataccgctccgaacacttcctggacgcccgtccataccatttcccagtctccggtaaagatcccggcaaaaatgtcgaatagtccgagaataacatcaaggacagcgcttaatatgttggaaatttgctggaatactccctcgaataccggagccagaaggttgcagaaaccattccagatcgcgcctaccacttcactaaagttttcaaagtcaaagcctaaagcgtttagtcggtcaacaatttcctgcccaaattcattgaatttatcctgtacaccctcccatattccggtgattttttcgcgaaactcttcgtttgttttccacaagtgcgtaaatgcagcgacgagagctgccacaatggcaatcacggctaaaacaggcgcggaaatcccacctattgctgtaagcaatccagtaatagctccttttacctgccctattttggcgactatactcccccattgcatagctacgatgatcgctccgatcgtggaaagtgcgatccctacctctggcaagtgggagagcagccagtctaccgccgggcctacgtttgagtttacgaagttgactgcgtttttcattgccggtgtgagtttttccgcaataggttggacaacttcggccttgattgtacgtccaagttgggagagtgagctctccagcgtatcatatgcggcgctgtccaactgctccatggcgtttatagtgctgtcaatttctccctgcgtattcatcagggccgccacggtgtcctcgcccagatcctcccacatggttcccatgagggtttgtcccagcatataccgttcttgttcgtcctctacgcccatgagagcagtaataacctgctgcatggctttccccgacgactccgcaccgctttccagtttttccgacatctcgtcagcattaaatcccagttcttcgagggcctccgctgcggttccgtcgttccaccggatattgtactcctttactgcgtcccccagcttgtcaatgctccatgtgccggactccgcgccgtttgccagcatgttgaacatgtcattagcagaatacccggcatttttaaattggacgctgtactcgttgatcgtgtccagaaggtcgtcgttttggttcagcccgttttgcgccccctgaacaacaaggttgaacgcttcctcggagcttataccaaactgatccatgaggctgttcacggttcgcatactctcggttacatcaaagccgaacacgtcctccagtgcgatcgcgtttttggttatctgagccagtgaagcattgtccagatcgtcggtcatttgtataacagtggcgagtttgtcagaaacgtctccgaggctgtcgccataattggagttatagacttcatacattacgtctttgaagcctttcatttccgaagaagtggcccctgtctttgcctccagcatagcgagagaagtgtctccctctgttgccagctctttgaaggcgtccactgccttattgatcccctcggtcacaaggttggcgaggacatttttcatcaccgtgtagccttcgctggagctctctgcgtcctgtccggcgtcctccagagagttgcccagttgatccgctgcctgttcggcagcgcttagcctctgccggttctcattcagatcgccggaaagttgggtgatctggcttgccagttgccgcgcttcggtcgaggtttcgccctgttcaagcgctacgttggcataggagcggcgcagagtttcaagctccgcttcttgttcgccgatctgcttttgcagtctgctgtatgcgccggccgtttctccttgaccggccgcgagtttctgggctgcttgatgggctgcctcgagagtgtcccggttttcgtttagttctccggacaggtcttggatcgtattggcgagctttagtgcttcgtctgtgctctcggatccgcttacaatatagtcctcatacccgcgctggaggtttttcaggacagactcctgcgtgctgatttctgccgccagttttgcggcggctccggcagactccaacgtctcctgactcatttcttcgagccggtcaacggcttgctttatggcctgctgtaaagatgggctgagggaaccggcgatctcgatcgttgattgtaaggtcttgcccgccatgtcctcacctccgtttccttacatgtttgggcttgaagtgcggccggttcttctccatgcgttttctttcttccgcgagatcctcggccgcttctgcatattcaagaataaagtccgttactcgctttttttcgaggtcggacgtgctggtgtggtagactctggcgtagtctcggtaggctcgtcggagtcgctttccgtttgtgctttctcctccgacgtgagcataaaatttcgcccgatccccataacctccacaacgtcgtggcccttcattctttcaagatccgaaaaatcgtaggaagggtttactgccacaatagcagcgaagccgaggtaaaggtggagactaaaatcaaattcagccgccggggcaatagagaagtctttccttccggctgcagcttttcgttttgactcagccgtagcaaaaaggatcccgtcgatctcgttggagtcgtaggtcacttcggtgatttctttaccgttaatcaggatcggattttttaagtgcaacgttcctttgatcgggttcttgattacttcgttcatcctgttaagctcctttcaaaaaataagcccgccagaggaaagtccggcgggccgttcattcagatattcacatttatttagagcaggttgttgattgcgctcatgtagtccttgccattcacgcggaggatctggctcagtctgtccacgcacatatactccgcgccgtttgcgtagatctgcatacgggtgacagtgtaagtgccttccgcttcggtcgcggatccgatttcaacgcccagctccgggagcgccgcgggcataacacggacaaaagccttgcagccctcagtcccctgagtgccgtcagacttgacgacgttctgcacccagcgaaactcaaggttttgcttttccagacgtcccagacggctgaggcccatgtccacgccgatcttggtgatcgtgagctccatgttttccagaaggcccacgagtggcacggtcatgttacccatggccatgacgtcagcggtcataaattcgaggcccggaagggtgaaggccacgtccttagccaccagcgtattgtcggcgtagacggtatcagccaccaccggccctttaatatccagccattttcccatttttctgcacctccttattcagactcaaagaaggactggaaaccttcatcggtatagcacacgcgaacagtgccggatttgaacggaggtgtaggcgttgcggaaatatcccacacgaagtcgccgttcatcatgtcgctggtcgggtttgcactctccaaaaactccaccgtaggagtgccgatcagagcgccgatccccagaagggtgtcgagcttctgcttctcgaagttcaggatcgtgtccttgtcctgcggagtcatgggggagtcgatctccgttccgtgatccagctggaagctgttagtgatgtgcataagcatacggatattgttgtcgaagattgcgcgggcgtccatgctgccattgtaggtgtaggccgctgtgtgcgggccccagagtacccactgaccggcccagaagcaggccgttgtaatgcctttctcattcaggctgttggcagtctgctgatcgaagccgcggctcttggagtctgccccaaaatactgagccgttgccatgatcgccttattggacggagactcgaagggcacgccgtcgttctccagatccacgcgcagcatagtggcgcttccaacggtggagaggtggaacacacggccgctgccgtctttcacctgcggccagtacactttactgtactcgctgttatatccgttttcttcggcccactcctgagcctttgcgatcgtgtcgatcttctggctctggctgtccaccagaggaatgtcggcgttgacgaagccgtcccagtggccgttgagcttctggacggtgctcaccatagccttgtaaacttccgggatatggctccagccgggtgctgccagaatattgaggacggcattgtggtactgatagagcagagacatggcgtgcagcccggtgtactggccgtctgccgtttcctgcccgataatgtcgtcagactctaccgccgaggtgtccacggtgttgtaggtacactccagactatcagtttccagatctttgagcagctgcaccacgacggtgccctttgtaaagttgtagctgagggaatagtccacatcttcggccttgtcggcaatcgcgaaggtgtccagaataatgtcggagctttcaaactccgtccggttattcttgaaggtcagagtttttgtggtcttttctgtgtccttgtgtacgtccggatcgaggacgttcacgacgtagatcgggcccacattcccgacggtattgtcaaaatgctgggcgaaggcttcgcagagtgtgaagtcggcccagttctgtgcatatccgagcttgctctgggcgtcgcccatgtcagtgagcttaatcggcatattgacaagatccatgtcggcatagccccggatcaggtttaccggtgcggtgccgatataggcggctacgacgtcggcctgtgtggtgcttgccactttactgtcgccgatctcgccgtaggctccatgtttataagccataattttgcctccttatcataaaaaatcttcgtattgtttcggggttgcggtggttacacccgcctccagcgtgaaggtgatccagttatgccagtacgggtaataatcccagatgttcccttcctcggtgaaaagcccgtacttgatcccctgctctttcacgagccggtggcctgcgatatattccgcattttcaatttcccgcagcaccagatcggcgaagttgaacgagtccctccagccgttcatgttgcgggtgtatgtctttgcagcctcccccgtggcgcggtagtaggaatacccgccgagtgctgcgctgttttggcgagggtagtatatttccccgccatgttctccggggttccagcaggcaaggcagagccgaaactggagccgacgctgccgctttatgaggtcgtcgctcccctccataagctgagcgcataccgaagggatcggggccggtacattcggcggtagcctgtcctttcccggagtgtataaggggaaggcggccgggttcacaaactccacgtcgtagtcggtgtcgttccggtagtcgtccgggagtttgagctggatctggctgcatacattttccgcgagccacttcaccagattgtcgatactatcaacaagtaacatggcgcacctccttagcctgttctgttctggcgtagagctacctcaatgagccccatgtcggtgcctgagtttgtcacgatcatttcccggccgtctacattcaggagcctgccgggttccatgtctgccggaaaatccgtctgctttcccatgagaagcatgtcggcctcgacgagtccgaggatctgcccctgtttgagctttacgagctgatcgttgtccaccacgacggggatctgtttgccttcgacacggtgaagctctgcaaactcatccagattgaggaataccgtgtcgagatcctgctggatctgctctttgaaggtcacgggttagtcctcctgctctttggcggctttcgcctttgcgtcctcgatcatggcgattacctcttttttgctccggatcttgctggcgtctacgccatacgctgcagcagcttcccggagttctgccattttcattttgctgtatgccggatcctcgtccggctcctgcacatataccgcaacgccagcggctacaagctcagcctcgcgggcgtcggcaagagagaacggagccgatcggcttgtcatagcctcaacgactccgtttattttcaggccgtaagcgcctttaatcatttttatcatggccgcctccttactctggatctgcgacgtccagatccggcggcagctcgtcgtcctcagcgcctgcctctacttcctcggctgcgatcgcggcgatatagtcggcctttttattgcctttgacttccacgcccatttcagccgcgagctttttcagctcgttatagctccagccttccagctctttggcgtcgaggtgtcccttcactgtctgctccggttcctcggcctgctttggttcggcgtcggcctgctgtgcaggcttcccggcagttccggcatagatagccacgcccagacggacaaggcggtcggcctgttcgtcgctacactcaaaagccccgctttccggggttttaagtgcgtggcgcttcacgccgttagcgtcggtgtagcagataccgcagcctccgcgggttattctgattttcttcatgctttgctcctttctgccgtgcttagtctgtcacgactttagctgaaatgaacgggttttcattgttcggcatacaaagaggtgcggatttcagcgttacctcgcggacgtcgtgagtggcgtcgctgagatacttcggcacgttcatgccggtgtaagtatgaaactcgccgtcggcctgctccacctgagtgatcgcgccgtacactgtgcggccagcagccggagctcctaccgcgatagtgcccgccgggatataaggcgtcacggtgccgtctacttcggtgtagttgtcctcgtagctgagcacgtctaccatgtggcccttgatgttcaggcggcagatcttcgttgcgccagccggaagggtttcaggatccacgccgccgatctgatagttgcggttgtcgagcagtttcagaatccactcgttgctcaggataatgtcggccacgtcaggagccaccagaacgtccgtggccgggagcccgcgagaggtcagcatggagatcatggacgccatgtcgctgatcatctgctttccggacgcctcggtcgttgtccagtcagcggtaggggtatagatcgccgggttgctgtctccgtcgaagtagcgtacctcgcgttcctcgaagtgctcgaagtcgtccacatactcgtccatggtgcaggcgtttttaaagattacctgcgccgccatggcttccttgcgtcgcgcgttcatgccgcgcagttcgtccagatcggccagcataatgacgccctgtctctgctgaggtgtaagggtagggtagagggcctccccaaaaccgcgctttctcaggtcgtcaatagtgaggggacgcttcggtgcgatataggacggagtaaagcgtctcatggtgtagccgtcgcgcaggatcgtgatcccaccttttctgggagctacgaacggagccgccttcttgtgtcccttcttatactccaccagcacgtcgttggtggcgaaaatgtcggtcgccgcattggtcgggaaataccgatccagaaggaacgtgtgcagaggcgggagctgctggacggaagccagcagtgtgtgagtatcataaaaattaaaagccatttgtctgtcctccttcttaaatttctaccgcgtcagagatcaggatccccacgccgcgcagtgcttccttgtctgctgcgctgaaagtgtgctcagcgtccataatcagggcgttgctgttaaagtggccggtgcggtacgctaccgctgtttcgtcgttagcggttcccacggtgacgtcctcggccagcacgcagttagccgtcagtgtctcgttggagactgccgccgtgccgaggattacatacttgccgtctccggcagttccttcggacagggccagcacggtgccgcgcttgtaggttgtctcagcggatcccttgcggatcacaacggaaaacggctcagccggaggatataaaccgttaatcaggttatcatagccgacggtgccgagagtttcgtcgagtctcttactcatttctgtgtacctcctttgcttgcgttataggcgtttactaccgcctgaatgtctgccgcgtcctgttcttccttggtggcaggagtgccaccgttcggagccgcgcctactttggcggtgccggacgctgcgccgtctgccgtgtagtttgcgagaaactgctggccggacgccgcactctgctgcataacacggaaacaaagctcctgagcagtgcaaggtttgtccccgtacttggcgtcatggacaagctgctgatccgggatagaggcagcgattgagtcaatgtctgcgagacgctggcgctctgcggatacggcgtcagtggtctgagtctgggctgcgtttcgggcttcctgctcgatctggctcaccagctccggctcctgtgcccttaattcttcgagtgtcatgtggtttttacctccttctgtttttgttgccgccttgttggtcggcctcttatttgccgccggacgtttcgccggtttggcacttctctggatcgggatagttcccggtacattgtgcaagccctcaatgttgtggcttacaccgttgacgtagaggactttccgatctgagctcatgctcatgtccggttcttcctcgtcctcctttaaggcgtccgcgaagcccttgtcgagagcttcccgcccggtcatccacgtttcttttgtcatcatgctgcgcaaagtatcgacgccgagcccggtctttccgtcgtagatttcagcgacggccctttcgctggcgtccatgcccttaatgagctgcttcatgtcctgaatgttcaggctgtcccaaagcatgacactgacgccgtggatcataatcagggatccggggtacacggtcacggtgtcaccggcgcacataatcacactggcagcactggcagcgatcccttccacgacgacattcacgtcgccgctgagtgctttcagtgcgttgtggattgcgatcccagtgtaaaggtcgcccccgcagctgttgagctttacggtgatgtgggctttatcctttacggctgccagatcctccatgaagccctctggtgtgatgtaaaggccgggctccggctcgcccgtccaccagtcgatcggctgctggctcataacgtcgccgtaaagggtgatctcgccctcgtcctcgctgacgcttgccacattccagaattttgtagctgtggctgtgggagccgctgccggtgctgggcccatgtgcaggctatgtggtgctttcattggctgtccctccttgtatggattgtttgatctgctcgcttataataaggccacgcagagcctcagcgccccgtctgcgagcgttttcggggttgtgtgggttattgtctccctctgccggttcttcgccttcttgcggctgctgtgggcctcctgagccgcttccactttggtgcggatccggcgcgttgcctccgagtttttcgttttccctctggagctgttcgacattggcgtcccactgaccgccattgagtcggatcgtgctctgctcatgggtggaaaagccctcgctgcacgcgaggatctctgcggtgatttccttcaccggatcgagctgtccctgagacgggcccagccactcgctgccgagatatgcagcgcggatcgttgggttgtcgaaaaatcccggtgcatagatacgcccacgggccacggcttcgctcatccacacttcatagcacggtcggcaaaagtcgtctgccagccattcccggcgcattttgaacgccttccacgcttccagaagggcggcgcggctggcagaataggagctattaaactgtttcagcagaagatccgcggggacttccagagctgcgcctacctgtgcgctgattgctgccacgaatttgtcaaagctgccgttcgggtgcgtcgggtttgcaaactccacgctttcccccggagccatgacattgacttggcccggccccatgctgtagtcgtttgggcctttcggttctcccggcacgtccggatccgtctggttgaacgggttctcgtcggtcggagcctctgtcttgatgaacgcggtataaaaggactccaccaccgcagccataagctcggactccgtgtatctgcggatctggagcagcggctcgatcacctgtgccagatagctgacgccacggtactgatccgggcgctcggtgtcaatgatgtgcagcacgttggggagtccggtgtgctcctgataagccagcacccgcgcccatgttgtcgtcggcgctccgagttcaaacgggtagttgctgcggatatgataggctactaccatgccgttgctgtcaacctctacgccgtcgtagatcgtgttcccgttgtccgggtttcttccggtcgtataagtgacagatcccccggatccgtagcctcccggtgttgcgattctgtctgactcaatcaggtggacgcgcagcgagtaggggagcagccgggtgacggggtactgtttaatcagtccgatacagtcgccggataggagccacgacacaagggcgagctgctggagcccgtagaagttgttcatgccggtagcgtcgcaggcccgtttgtctttcgcccaaaggttaaactcccgctcggtggttttctgccattcttcggcctgctccggcgtgagtcccagcacctccctgtcgatccggcttttcagccgcaggccgacacccaccacatttgtgcggttggttttgatcgctgaggtggcgacgggggcggccatgtatagcatacgggagcgttgccgtagggtgtagttattaaagtctatatcctcatgcgaggatccgctgggagcattgaaacccttcacggcccgcttcctccagctggccccagcttccccgtaccctttattctgcggccgcacgtcgtcgggcagatacattcccatttccttgtggtatctgatttcactcacctccttgcatgaaataaaaaacggcgcagccgtggaagcaaaggagcgaaaacctccttcggccgtgccgtagtaaagccggagtgttccggcatttacccattaccagtcgcgcgggacgactcccaacgctctgcgaggggctcgcccctccagttcagcctccagctcccggatccgggcgcggagcttctcgatcatgtcctgaatgtctttcagggcggtactgtaatattgaatattgcgggatccgatcccatagctttgcacgccgttctttgccagcatgtcagcctcgcgctccagataggcgtccagcctccggcgcgtggtttcgagctcctgctgtatggtcgcttttgatcgtgccatagtgttgcctccttaccattcgtcaaaatactgcgccgcgctgttttgtcggcgctgcggtgctgcagcctttttcggtcgcggattttctggcatgtttctgagcctgcgctccacggcctccatgtccgggttgaggatccggaaacctccgagtgcatagttccggcagtcgagggcctcgtttcgttcatgtccggggatctttacccacgcccagcggttcccccgcttggtctgggtaagttccagcttttcagacagtagcccgttgaaataataagagtcatacccgtagacttcgccgcgcgggaaatggcaatatttcgcgcccggctcctgcacctttatgtttgacatgatcgcctctttcccggcgtctacaccgaaggtatagagccagcaggtgatccgcttgttgtccttgatcgccactttcgagggcggtgtgacgaatgggatcccgtcgccgccttttcccttgatagcaaagacacgctgatttttccgcgcccggcagcgcgtgtaaacttcctgcgtatagtggccgccagagtccacacatgtgatcgagatcctgagcccccgcttgttgtctttgaagcggtagacatgcccgatcacgtcgtcgagctgctgccatacgtcgtcggtgtccggttttcccatgatgtagcctttttttatgccccatgtttcgccataatagccgtgccccacaacttcgtattccagccggttgtcctgtgtatctacgccgcaggtcagcacaagcacgccctccggcagttccaccggggatccgtctgcattggttccgtagtcctcgcggcgggccagcatggtgtcctcgtcgataatgccgccgcgatcctcccagagttcgcccagcagcgtgttgtaaacaactttcagcttttgcggttcgtcctttgcctgcaaaaatttgaggacgatcttttcccatggtgtccacggggacgagaaggcgttcagccagaaggaacgcactccggtagcgtaggcgtccgggttttctgcaatccactttgcaggctgtcggcgcatggtttcctccggcacgaggcacccgcagttcggacaggcccatgagatcggcccgtctatgctgtacacctttttcccgcgcacctttttgacagtgtgcttgtagtggatccggtcgaatatgatctcgctatactcgccacactccgggcacttgtggcaccagcgttcctgtgttccttggtagtagctgctttcaatgttcgaggctccttttattgtcggagttgatacctcgacggccttcgcattatagaaggtggtctgtctggcttctgccagagcccacggatcgccctcggttccggcgctgatcgcccagcggtcgcgctcgtcgccgataatgtagcgggcaggagtggaagcaagagccgacgggctattggagcccgtgattgtcagcataccgccggggaaggatttctggagtatcgtgttcccggagtccttcgccttaatatccgaaaccttagctttcagcacttggctgtcccggatcatgggggcgatacgcaagcgggaaaatttgcgggcgtcgtcgagtgttggctgcacaaaaataatggagcccggatcttggtctatgatgtagccgatcacgttcagctccagttcagacttacccacctgagacgctgccaccatgacgatttttcggattttcggatccgtgaacgcttccataggttcccggagatatggagttcgtgacgtgcgccacgggcctgcctctgctgaggtttccggggaaagtcgccggtgcttgtcggcccactcggccaccgtcagttcttccggcggtttgaagttttggactgctgggcctatggccgcgttcagcctcttggcggcttttttactcgtcggcttcttcatctgcgagcgcgtcgctccagccttcgcgatccctcacgcgccgccggtatgcttcgggatcgtattgatagcccgcgagctcgttcagtattttgtagcactcagcccggatcagggccgaggcttcgttggcgcttcctgtctgcacaacgtccatggcgaggcggccggggagtgccattatcatgctgcgggcggtataaacgaggtcgttcgtcatggcctccacgtcctcgctgcggtgcattttcccctccagctctttaagctggagctcggcgatcttggccttgctctgttttagatctgcctctgcccgcagtttgtcagcctctgcctttacggtgtcggccgttttggcctccttcccatttgcccgatcgcgtaggtaacgaatgtatgccttgacggtcgggagaaggtcaaacttgtagggcctctgtgacgccgccgggagaacaccctcctttgcgagctgctgcacccgccggggatccagttcaaaaagtttagccatgatctccgtgctctgtaggttctgtttcggattttctgccatagcgtcacctcctttccgtgcggtcaggcgaaacgaaacggcctgaaaaaaaatttctgagtctgcgcgtgttttgggctcgccagcaccgcagggcttttcggagtgtcacagtaccttccgggcggcttgcccggttttggtttggcctcgcctttgggttggctcggcctccggcccgtgtgcccttgcctcttggtgcccctgcgttgtggccttttctttcttttttcttggtggctgcgctcgtggactcggctttccttgctgcccggtgccttggccttgccttcctgctggttacttcatagcctgctctatgtggtggttgaagcgttcgcccagcttctcgttgattgtctgctcgattgtctcgcgagctctgccgtcaatcatctgtggcacggacaaggtacgcactgcctcgataggagagcggccctctccggtgcgctggtatggaaggacggccccgcctttgccagcggtcaggaaggtgtcgctgctcatggctgtacgctgtccttttatgatcgtcacttttacagtgtactttctgggcggtcttaccatagcaacgggagagcccccggctatcagctggcccggtattctgatcggtttcttttgctgtgcagaaggccgggcttttgggctcattttgaagtggatcggtgtcagggttctgcccttatattccagagttgccccgtccacggatatgccagcgacacggatcgaagtccttccgcgcttcggtttcttggctgcgtcctttatggccgcggtgtctacgccgtagtgctcgcggatccctttggacacccagccggggcctctgctcgtgaagtctgataccgttcgctttatcgccacttcgcctccgtcctttagtttctggatccttttcactatgtcgcccgctccagagtaggagacagtaaagctgccgcttgttctccgggccgggcctgtcctgaataggtcgctcatggcccgcctcctttccttcggaaacggaaaaaccgcccggagacttgcagtgtctccagacggtttccgctgtcttatagtgtagcacatgggtttatccctttttatccccttttgtccccttttatccctttttatccccttttatcccctcgccccggaaacactgataaaatgggcgtttgcggccgttttcaggcggcattttgggccccattattttgttaataaaaatttaataattatttttgcccggttttccacattgtcctcctgctgcctgtggacaaaaaacgcccgcttccagcctgttgtggcttttagcgggcgctgaaatatttctatttctgtgcgtatattttcgccagcgattgcaaagcagagccgtggatcttaaatgtccgctttaggtaccgcttttcgtgttcttcgtagtcctccatatccccgaacagggcagcgcttactgcccaccaccgtgcatgatcgaagtatcgcatttcaatgacggtttgttcgtccgggtttttcattttcccgatcagcagctccagctccatgcgctcgtcgtattcctcctgctgcatggcattgatcgcctgagtaagttcatctttttggacgacctgcctttccgttttgctggttccgtctccgccgcctcccggcataccggagaggttcgggctggaaggtgagcccatgacggactccagatacacgagccgctcgatcttattctcgatccggcgctggaaggtcgcatagtgctgcagcttctcctttattgcgtcggtttccttcggccgctttcctcccgccgcctgttttttgtgccccatgggccccgcctcctttcagtctcatttactcaaatatcccctcgaacacctcgcggggctgttcggatcctttccttatgagccggatcccggttgttttcccggtggttcttatgtagcgcctcacgatcgtgtccacaaatgcgggctccatttccatgaggaacgcctgctgcccgacgctctctgccgcgatcaacgtcgtgccggatcctccgaaggtgtcgaggacgccctcggcccactgggtattgtccagcagcttctccagtatttcgacgggtttctgcgtcgggtgcagttcattcccggagcgtgtggcctccagtacgttgccgtagcctttgtgattatcccacttcggctttgtgcggtgtgcaaacatgatgagctcatgctgcgccctccagccgttacccatgccggggctttgcttattccacacaatcatatttctgacgcccagcccggagccttccacgaggtcaaagagatagatccacattctccagtccgtgaagatatacgccacttttatgtccgtggctccgaggacgttcttcattagcacctgatagcctctggttgatagattgtcggagctgatcgtcggagttgtaaatccgccctttccgtcggactgtttgcttccaatgcttccggttactctgccggactcctgaaagccgccggagcagtagggtggatcgctgagcaggatctccgggtgggctccgtcaagcagcagctcccgatcctgttcgttcgtggcgtctccgcagacaacgcggtggcggccgaggatccagaggtcgcctttctgagatatgacggcctctgcctccggtgtttccggtatgtcgtccggttcgttgaggtcattgtgaagggcttcggacagggcagtgacgaggctttccacctcgtcctctgtgtagcctgtcagctccatggggatctccccggtgtctatatctgcgaaaatgtcagccagcagcttattgtctgtctctgccagctctgcgatccggttgtcggccaccagatcagcgtattcctccgcttcgttggtgtagttctggtagtctacgggtgcctgcttcataccttccagaagggcagcagagaggcgtccgtgtccttttacgataaagccggagcgtttgctgactgtgatcggctgtctccacccggtttgccggataatgcggccgagtagctggatctgggcgtccgggtgctggttcgggttcttcggattaggtaccagcgttgcaacgtccactattttgtcatgggcgcagaataccggcacgccgtcagcgtatgctttcggctctgcctctgttttatagtccatttatttgccctcctgccttccggcgcttcctgccgcttccatgatcctgccgcggagctgccggtctgtctctccagcctcgcgctggatcccgtactctttggcgagcagctccagagctcgtcctcctgccgcctgtggtgtccatgccccgatcgcttttgcctgccggataattcgacggtctgcgactttgcggcggcgctttctctttatgtgggcgatcaggataatgagggcagccactccgcagatcaggcacataagcacgagtgggagccaaaacaggccgagggctacgccgatccagcttattcttaccacgccgagcagtttcaggaatatgagaacgatccagagcaggaaagaggcgagagcgtacaaaatccacacgccgatcgggttgttatcttcgtgcatttcttttcgccctccttctttgctcccggttcccgccgggctttctcctgtttctgggatagtctgacaaaaatcccgcttttatggcgcactccgtacaaagataggtgacgtcctgcgcctctttgagcttgtcggctgcgggcattttccagcacttctggccgcagagagggcagtcgatcagttcccagtccgggtgttttttcttggtgtctccgttcaggttcttgtcgagcggcaggcagaggatcccgcccttgtcgctgtattttctgggtgtgagatcaaagccgcgggcccggagttcctcgcgggtttcgttcctgacttcctcctgcaaaacttccacgacgtccacctgctccagcgtcaggcaaaaggccccttgtggctcccacttctttgccttccatgcctctgtaaagccttccagtgtatcgtagaggcagagcccggccgctgtttccgtctggtaagtcgtctgcatgacggactcgtcgtccggctcgtcccagccgtaaaggtgccagctctcccggttgtcgtagtcccactgggagaagtagagtgtgtgcccgtcaatcggccagccggtgccttttacggttccttttatgattttcggtctatattgcacggtgttgtcctccttatacttgtactgggagggccggagccctccctctggtttttggtgatatgcggggcttatgcgattatggttatctgctcccggttgggaatgtcggccagcgcgtccataagataactctttacattgtcaacggccaccgcctcccagcgcccgccatcggccgataccagcttaaaggcaggagcgccgcctctgccttcggtgatccgaaaaacaaactcactttccggctgctctacctccaaaaatgtgcggtaggggataagtctcaccgggttggggataatggcgttttctttctttgtgacgccggttttcattacaacttgctggctgatcccgtcgtccgagaatgtggcctcctgtgtgctcacgatattgctcgccaccttcgtgacgtcctcccgttcctcgctgggagcgaaacacgcctgcatagatacgaggaaagactcctgatcgtactcccggccatattcaaaatggggcagcagcgcgttgacctcaaagagtgtctcacgatcccgctctggcagcaggccggagtaaagcagcaccttggtggcgtttactacctgaataatcatgcgatccctcagttcctcccggctttcctttatgtagtccaccagagaggtgagcgtggtcgcccggatcggctccgctttgtctgcctcgtcgtaccgtttgagagatttcgtgcagtacgtccggccgttgatctctatggtttccggtttctctgcctttacggccagatctgtgataaatgcgatcgcttctctaattccttccatggtttcgtcctccttttcttatgcctgcgccgcggcgcgttccattactacgatttttccgtcgtttttcggttgttcttcggtctgtccgtcgtttgtccggcggtcgtcctccggttcgtatatttccccagttaccggatcgaagtccttaccgggtatcaggcggcctgctgcctccggatccggatctgcctctgcctgctgccgtggctccggcttcctgcgtctcatatcaatgggagcaccggttggaatgtcctgctcccgctcggcctctgccggttcggcctcctgctgcccggcggcttcctccttctgcggttcttcctctgcgaagtcggagaggttcatctgcccacggatctggccgtcatactcggcgatctcgatctgcccggttctgatattgacgcccatcaccatttgagtgtcgattgcctccgtagctgcgagcttggtcgtgacggagatctgggtattgattacttgacggctcttgttcggtgcgaattttatcgctatgttgatctgtctcttggtggtggcttcggtgttcgggttctgaatgttctcagccacctgcatgagcgcctcgttgagcttctcagcgaaggccccgcctgccagtcgttcgaggttgatctggctcgttactttctgcttcttcatggtcgtgtcctccttttgaatttgtccggggcgtcgcatgtgctccagtgtggaacgtagccccagccttgtgcctctgccggatcttttaccgcctcgcagcttatgacgtcaccggcaggcgttaccagctttgtgtcccctccgtgttttatgcggtagttgaccggctttgtatcgcacggcattgagcgcccggttcgtgtcctgatccagaggatctgtttcccgcagcttttacatgtcccagtgttcactcctttgcgcctccttcctgagctttcgcagtctccggcgactcggcccgatatatttcgcatgatcccagtatgccgggttataccggcagccgggacaagcgttttcttttgcgccttggcagccggggcactcgtggatctcgccgtactcgtcgaagcatggcccgaagatacaccggagcccgaacacgatcagggccaccatgacagcgccgactatggccgcgcttgctaaaatgattatggcgaaaactgctattattgcgtcaatcattgaggaagctccttcctgcgccataccgcttcggtggccgtggagtgtgtggagcgtctacgcccgcaggtttccaccacgcccatgtctttgagctctgagagtctgggcgctacatagttgcggttgtagtaggggatccggcccgctttcaccagctcgtccgtgatttcgctcacggtcatgctcctgctgccgagcgtttcaaggatcaggcggctgcgttcctttgctttggggataacggcgtcatagctcgcccgccgggtttcctttgtggtttggtttgttcccatgaaatacctccttttctgccttccatgcgatagcagagcgccccgtcacgctgcaatcacgctttccggcgtttcttatcagtccagccgcctgcgctttggttaggatcgggcccacgtcgctgcggcttacctgctgccccctgtctgacagagtggcggcgatctcgttcgcggtcatgtccctgtcctttattaaatccagcaccatgtcccggaggctctgggccatgtccttgctgcgccagatcacgacggccgaagggaagggagcggagcacggccgccctttggcgtctttggtcgggttcccgtcctcgtccgtgaatgtgagcctcccgcggataaagcgcacctcgtcggcttttccgtggaatatgtagtcgtggaagtaggacgtgtccgtgcgggccggtatgagcattaccacgagagtgccgggtttcttgctttcctcgtagcccttccgcacccagtctgtgatctggcggccgtagggcggattacagaacacgcgacaccccccccagtccgctttcaggccgtcgtcggccggtgtaaaatatctcgcgcacttggcgcttttatcggtggcggccggatcgaggttaaaatgaaactcctgatccagctcgctgaaaaagtcggccggagtacaccagcccatgtttttgctgcttaatagtgctccgttcatgtctgtgctcctttcttatgcctttacggccgccatgtgtaccgccgggccgcattgtgtctctgttgcctccgccagcgtgaggatcgggcagccttcgcccagatttctgcacatgttccgggtggtttccttatccatataggcccggatcggttcgccggtttcccggtttttcaggatccggctcatagcgctgcagcacgctttccctttatgctccccgaaaagctggatcccgctgcactcatggcaccattttctttcaaaattcatagcgtttcctcctgctccccatattccagctctatgccttccagcagtttgagcactccggcgatatactgcacccggaagggttcgagctctgccttgttcatgtgtttatgtccgtatagtttccgcatatcccgccacacgccccacggcacccggtagaagtcttgaagctcgacgcttacaaggataaaggcggcagctccgaggcggtcatgctctgcgaggctgctcagctgctctggtgtcagccggttgtactcgatccggtcgctgtccgtgtgctttgcctcgaataccacggcccggccgccggtgagggttcccttaaaatccggttgtcccgctttggtatagcaggcgagaaactgcccctgccggtttggcggtctgagcggtcgcatgggctccggcgtcttttcaatgaaagccacgcccttatctttataccagccgaggcttgcggcgatcatgttctcgaagtgttcgcccgctcgcttgctctggagcccccgctggctgcgctggacatttgagagggcagcggcagcagttggatccggatagccctccgcatttttgcccggcacatagtcccagctcacgcctcagcctccacggtgatgtcgtggccgcggtttcgtctgagctctgctgccagctcgacgatcacctctccgctgatccgcacggtggtggactcaaaggcggcgactccatttattgctccggtgtgggtaggaaggacgagaagggcgtcgcccagctctttgtcctcctgccggtttccctcctgctcccggaggcgatagagatcggcggcgtcttttaccgggatcccgtgttctttggcgtaggcgatttcctttttcatgccttcgctcggattgtttatgccgtacacccagagctcgtcgcacatgtccagcagcgcgatccccagctccatgcctgcctcccgctcctgcggtatggtgtcgtcaagaaactgggtgcagtagacatgcggcgcgatcggtatcacgtccagccaaagttccaccgcctcccggcagtagccctgcgccttttgtatgttcttttcaatgtccccgcggagaggggaacagatatatataagcctgtttctcatggtttggctcctttcttccttccgggcttttcgtcctcaaattggtaggtgtggccgtccagcgcaaaaggattttttactttgccgttgcagcggtcgagtaccgcctgataactcatgtgattagcttttgcggcttctcgtgcggatctgtatatctctacaacttcgccggaggtgttaattttgaataccgtccttcttttttcggccatgtgtccggtattccttccgagtgtttgtttatctataaatccgatattttcggctcggttatccgttacaatgccgtttttatggtatggcaccattcccgaaggtgtggggccgtgccatgctccagctacgattttaagtacggccacttctttgcttccgttttcgcccgtcagtttaacgaaaagcctatttcttagaattttcttgtgctttgctccgctctttttgtatggtgtcatgtcccttaccgagccggaggggaaaactctccggatctctccgagtcggtttacttgatattttcctccgtagcccggtatatctcgccaccagttcgggccgttttcttctggcatatatgctttcatgtagccgctcctttccggcagcaggcgtcgagtctctgcctgataatttcgcaatagtccgggttgatctctatcccgataaagtttcggccttcctgcgcggctacggcccctgtggtgccgcttcctgcgaagggatccagaacagtgtcgccgggcctgcttcccgctaatatgcacggcctcacgagctcctccgggtatgtggcgaagtgtgcgcccttatacggccgggtggctactgtccaaacgctgcgccggtttcttttcccactttcgttgggagcgagcccgtggctttcccgcttcacggaggcactattgttttgcgcccggtcgtgggtgtaggcaccgccgcccctaaacgtccgggagtttccgcgccttctggcgtttggttttcccgttccggcgcttccggctggcgcagcattataaaatccaacggctggctctttcactgcctcggcgtcgtagtagtagcgtgagcttttgcttagtagaaaaatgtactcgtgtgctcgtgttggcctgtcctttgcgctttccggcatggcgttgggtttctgccagataatgtccgaacggagataccagccgtccgatcggagggcgaaggccagcagccacgggatcccgttaaggtttttctgcgtgtagctgtccccgatattcacccagagggtgccgtcgtcattcaggactctgcgtacttcccggaagatcttcacgaggttctcaatgtactgatccggcgtatcttcgagcccgatctgtccgtctgcgccgtagtctctcagcccgtagtagggcggtgaggttatgcaggtgcggcagcaggagtccgggagcgttctcagtgcctccagcgcgtcggagtttatgatcttgttcatgtgttgctcacctccccggcttccagcgccagcggatccgcggcagccagagcctcccggcggttccagccagaaagagaggcgtaatactgttcgcgcttccttcggtcgctttcccggtctgcgagctttttctgccctttgtccggcagagaggcggccacggcgtcgatctgcgttgtaagctctcccggtgtcatgtctctggccttttcccgctcgtacatgggcgtgtactgctgcatgaaggccacccgatccatgccgggcttgccgcctccccagtgtccccggtgcatttcccagaggttgttccagccgatcgactccacggcgcgggccacaaggggcgggagttgctgctttagatctccgtggttaaattctccctcggagtagagtagatcgctgactgcgagccacgcctgatccggagctatgagatccgggtgtgcaatctccagaaggatctcccggagttctgccacgctgggcggccacttgcttgttgctatgtgctttttgacggccagcgccaccagaggggcgtccacgtcctcaaacatcatagcccagaggctcacggtggcctttacgctgtcggcgtccctgaatttgtcatagttcgggtatgcggtgacgacgatcgccacaagctgagctgcgtccttttttgtcataagtcgtcgcctccttcctcgcctgcgataataccggccagcacgtccatggtgttgactcgtccgggccgctctggctgcgcctgctgccttaccggtgcctgctgccggttgtcggtgtatttgccttcgagtaccttcgccatgttcccggagttcatcagccagttaaagtctgccgtccagttccggtcatttctgcctttcaggaacggggaggcttcggctttctcgaatagctcgcggaaggtgttcagatcttgcccgtattctttccagcgggcagcgatcgcctttttccggtttgcgctgatttttctcaaaaccgggtagcttgtgcagatttcgtgatacatgtcaacgatctgctggaagggagtcggccccgcagacaaaacgctgtcaagcgtttcactttcttcctctggtgtagtctggtctggtgtagtctggtctactctgcctgcggtttctctctggctgcttcccggtttgcccgctggctgtccttcggtctgtccgtcggtcgtcctgcggtcggcggcagcagcagcgcggcgtctccgggatctctgtttctctgcttcccgctggtcgatcagcttaccggcatactcgtaccagtcgtggatctccagcgttccgtcctcggttatgtccagaaaaccggcgcttttcatggcttccacgaaggtgtccggctccttgttccattgagccgcccgcgctatattcctgttgctgatcccttccagcgagccgctgggtgcattgtccagcgcccagagccagaaggaagtcagaaggcccagcatgtgaggcggttcaatctccagctcgtcggcagccgccagcagctttctgtgatctttaagttgttggtggacttggatccatgccactgtgagcacctcctttcacggtcgcctttcggcttgtttctgtatgttctccggtctgtccggcggtcgtcctccggtcaattaaacgggagctcgtcgtccacgccgtccgggatcgacatgaagccgtctccggcgtctgtctgctgtgcgttgccatttgtaccgcctccctcgtagttgctgtctgcaaagtagatccgggaggccgtaacctctaccgctttgcggtgtttcccgtcattgtcctgccatttcctcgtcgtgatccggccctcgacgactacctgccgccctttggtgaggtacttcccgcaaaaatcggcccatttatcccagcagacaacggggatatagtcgggaggggtgtccttctttttactcggcaccggcacggccagatcgaagcgtgctaccggggtgcctccggtggtgtatctgatttccggctcctgagccagacggcctaaaaggcccacatggttaaacattttagtttcctccttgtccttgccttcttgctgcgtccagtgaattacagatctcgtcatactgcgcccgtgtcagcaggtggggatcttgttgtccgtatttctgccggatccggtcgtcgatctgctgctgggtgtagcccacgtcctcgcccttccggtacatacgggagagctgggcgtcggtgagcggtttctgagcccctgtgtgcccgtttgaggcgggttttcctgtctgctgggtatttctacccgccgggctgttctgaggcgttgtgccctgattttgagccggtggctgtgcctgctgagcctgcgctgctcccgtgaggtttttcatgtccggatcgtcctctccttggtcgatcccgaacttctcaaaaaggtagtatttcaggcagtaggtcagagcgctgcctttggccttgtccgggccgccgtcgttggttccgatcgcgtggagtgtaacctccagaatgtcctctgggttgtccgcatttgtccagcggatcgtgagatcttcctcatacacccagacagtgcgctggacgccgcgctcgttcatggtgtaatggtgatagtaaaggggatcgccttccggcgtgtgccgggtggcggtttcggccacaatgtcaaagttgacgccatgctcattcatggccggagtgagcagccggtacacgtcgctgatctttgcaaacttatactcgacgccttccgagtgcttcgcttttacaatggccgggatcgcctcccggagcttgataaacttctgttgcagagtgagagccttcggccggggcgttttctttgccgtcgccttagtggccgccggtttcgtttccgctgcttcctgcgtcatggtctgcctccttgaaaaatttgtgattgttgattgtcattacatacgcctgcgactcgtgccactcgctgtcggtcagggcgggagcataaaagtatttgatcggctccgttgtcgccacatgcccgaagtcaaacacggccgccacggcttccagagcctcgtctgagggctccgggcgtcttttgctatacgagtacatgccgaggacttcgtgcggccgcatgtcggtgtcctcgcatgtctggagtatgcactgggccacggccaccttaccggcgaagggttcgccgtcggcctctgccgtgagtacctgcgcgatctccagtctctcgtcgtcggtcagttcgtagcgcttttcaaatcctgcctccgacgcccacgccgctgtgagctgctccatgtctactgcgtagcctttgccgtatttgaaaatatagccctccggttccgtgacggcttctgcggctctggtttctgcggctgcttcggtatcgctgccgcggttaagtaaatgcgacgcgccccatactgtgaaggtagccgctccgaggatcaggaacgccgccccgatcctcacccagttatagcgcttgcaaattttccgcaggcggtataaaatagtcttggatttccggtcattcttgaccgggtttctggagcgtgtaccctgttgcttggtaggttgagggtaggcgctccttttgctttgtgcgtacatgtttacctccttcttttcactcgtgcgggtagagtgtagtgcggcgactgcatataatcgttaaaatgctgcggccagtaggtcacacgcgggagccggtcgccagtgactccatacttcgggttatatccgaacacattgacataactcagcaggtcggcccgctcgttgtccatggccttgcatacttccagcagcgcctccacgtcgtcgatcgcccggtgcgagttctttaccttatcccccagcttataggccgcgatcgcgtttaccagcttatgtgggtatgcccgacggtctttgtagactgtgaggctgtccagatagtcgcagcggctaatcccggctccgtttatagaaaaattagttaatctccccagcatttcacgaacgaacagaagatcaaactgcgcgttatgtgccacaagtaacgtccctccggtgctgtaaatcatttttgcgaaggctgcggcagcgtttccctccggtatgccttcggctgcgagcctttcgtcggtgatcccggtcagttccacgatcttgtccgggatcctttcgccttccggcagctttatgaacatgtcggcccggtctgtttctatgagggatccgtccgttgccttctcgatccggatcgccgccagttcaatgatccggcagcttttggcgtcgaggccggtcgtttccgtgtcgaaaaacacggccgcctcgtacctctggaatatgtcgcggaggttattcatggtcgccctcctttttgatcgtgatcgaggttgtcatggcgagctttgtctgctcgatcgcctgtctcatggcgctggctgctatgttaagctgtgccagctgcgaagcaatccgcaccgcctccatgatttcgtcgtcgctggcgttgtatgccatttcctcgaatgtgagtagatccttgccgcctgcggctgtgtagatctctgtcagcactttggtgagcatgagcttcacaactcccggaagtgtttccggcagagggaagggccagcttttcgcctcgtctctctggttcagcttatcggcgttttctttgattgttgctttgagcttatccggtgcgctgctcagttctgttggatcgtcgtccagatgttccagatcgccagagtctccagagtaccggactaaagcggagcggaagccgaagttcgtgatggagtaggagcgggaggagccgtagagggagaacacgcctgcgctcgcgccgcggtaccaggagcccccgcgagacacgcagcgttcgccgtcggtgtccagccagaaatattcctcgctttcatagccgggcgcaggatagaggccgagctcgatcagcttgtccggtacgtccatgtctgcacgctcgtgaagatcgcagaacggcacgccgtcgtagtccttcccctctggagcggttggctgcagcacgatctctccgtcttttacgttgtagtaaaccggatccccgtccggcgtatagatcgccgtccattctttcgagtctggagactgatccgcgcctgctgccgcttcgttgttcggtatgatctgcgcctgcccgttaaggaagcggacgcctccgacgtgctcccagacgttccccaccatgtcggccacaccttctgccgtgtggtcgtggttccatgtcaccgggccggatccggtcagcgtcttgccgtagcctccgtcgtatgtagtgccggtttcctccgggtggctgtggctcttgccgctgcctgtattgccacgggggagggtgccgttctttctgctctggtgggccagtgctgcccactcgtcgttagtgataaggtgccagcccggccccttggcctcgcagagccggatcgcgtcgtcgtgcgatacgttcacggcgggctgctggaagggcagcgagtgaggcacaccgtcgatcattgtcgcctgatacttgccgatcaggtacgcctccaccttgcggcctttgagctcagcagggagccccagctcgtccggcataaatgccaccataatgtccgggattccccggtcgtcaaaaataacctcgtttctcatgtgtttgctcctttcgttcgactagtcgccgtagatatagcgatctttgatttcttcccagttttccagcatggtgtcgtagtgctcggcgaagtcgtccagctgtcgccgttcctcggcctcgcgagccaccacggcccggtagagcttgtcgtcgcggtattgctccacgttctcccggatcacgttgctgatcaccgagggctccagcgcgtccagctcccagcactcgtcgccgtacttctcaatgtagccagtggcccggctgtctgtgagcttcgcggggtttggtggcgggttgtagagctccacctgatccatgttcagggccaggcgtttgaatgtgacgccgtatgtctcgaaggtgatcaggcgttcctgaatgtcgcggctcatatcctttccgcttggatcgtgatctccgaggtgcagaaggatgacgtgctggcccgcttcctgcctccggcgaagtcgccgagcggccgcccacatttcggactgggaaacgtagccacggcacgagaagtgggccacgtccagcttgccgcatatctgcccgactataccgatcagggcgtccttctccacccacacctcgacgtagttctgttggccttgccagtggtcgagccggtaggaataggccgcgctctcgatcacgctccccggcgtgctccagtgggagtttcccctgaggtttcgggtgcgatcctcaatggcgagccagtcaatgagcccggccagtctggcgtcgtttatcaggtttccgaggttcttataactccgcatattgttggggataatatcgcgggccaccatttggtagtacacctgccggagcgtcaggctgtacccttgtttttggtactcggccacgactccgttcaccttttcgatcatctggagccggtcagcgctaaagtttttgggcacatactcaatttttggcacggtttcctcctttctgctggcgttcctgctgccagcgtttatagtcggccatgacggccgggttttcaaacaatctgccgacgcagccgatcagcgtccggcacatggcgtcagattggtgagaagggatcgcgccgcagtctacggcgacggctcccggtgttcgtgtctggactactttcacgggcctgcgcctcctttcgtattttccctctgcataccgggcagaggtagccgctccacgggatcgcggcctgcttgcttacattccattccagcccgcactctcggcatgtctcataccgtgcgccagtcatgtgccgggcataagcaccggcatgagtacgggctcgcgatcgtctccggtcgccggttgtgctgccgtgtctgctacgctctgagcctgatccagctccacgcgatcctcgcagtcgcagcgctcgccgtgatccagattgcagccgcatttcgggcatactctgtacggtttgctcatgtgtccacctcctatccagcagcggcggccagcagcttgtcgcagagttgccgctccagtcgtcgccggtatttcttgcgcactcggtacttcttggcgtgcttgtaatagtgccaccatttcgggtgatcgttcgcgttgtagagcatggcgtccatgcacttgccagcgagccgggccatgatcttgcccgctgccttggccgctttcttgactccttgccacgcctccctcacggcctcgacgacgctttgaaagaaacgcagcgcggctggttgtatagcgttcaggatagacacggccgtgtccggcgtgatcgtgagcgtcagctccatgctgggcgggctccgaagttccgggagttccggttcaggcggggagaagtgcgggagctccagctgcgggatcttcccgtcgaagcgctgcccgtcaatgtagagagcgccgggagctgcgcgggtttcagcttcctgctgccgctgatccgcctccatgttcttgtgcatgagctcgtagtcctccgggctcatgtagccgtcgtagacgtagggatccagctctgcgctggtggcctttccgtaccacggaaggcttgccggaaggtctgccgggcgctccataggctccgggggaaatgctgtcgatccgtccagtaggttgcagctgttttcgtagttccagcggatcccgtcggccagctctgccagagtcatgtcctcgccgaagtgtccgcagtagtagccgtttaccatgacggccttcggatcctgctccagcaccttgcgggccagctccagatcctccggctcgaaggtgtcgtcgtcgctgttcagccacaccgcatgagcgttccagctccggccggttttccagattagcacccacgcgatcccgtcccggatctcgtcggcccattcccttgcgattgcgtttattgctgccatatatttgctcctttcaagtggttactctgccattcgcgccggtgtcttgaagtcctccagcgtgagatcgaggacttgacacaagttgacgaactcgtcggccttcatgtttcggttgccgttcagtgtcttactcagcaggtcggttttcatgtgtgcctgctttgatacaaacacaagagttacgcctcgctctttgatcctgtcgttgattactgagataactttgctcacgtttgcgcctcctttccttgtgtgggcctgccttgtcagtgctggtgggccggttccagcagacgcccccggcgggcgtttcggctatgcgctgagcttgcggtggcagaacgccccgcggttgccggtgctcagcatgtcggactctttgaactgggactccgtgtagtagtcggagcagttcaggatccccggttgtctgtccgggtagttggcccggaatattgcgtgcgcttccttcatgctgggagcttctacctccacccagccgccgcagaacgggaaacggtcgtcggatccgaatgtgtaaaatactttcatgtggttgcctcctttcagcagcaggcggtgaggatctgctggatcctcgccttgctggctctctggtatgccgtgtaaaatacccggcccgctatttcctgattgatcccgtagtgcccgtctgcgtagtgctttatgagccacaccttgcgcgggttccagtggtctgtatgccttgtcacggtggtgccgtttgctctgtgtctctttttcatgtcgctgcctccttccttagtgcagatacggccgcaagttgtcgttgtagagctcgtagctcatgcagccgcagtcgaagcggatatagttccagtcggtcgcattgtaaagaggggagcgatcgagctcgccgactttcctcagccttctgtggcgattaacttcgtaaaccgggacactgtggtggatcttgatcttctcccttgcgaagccgtactcataaagcagatccttggcttgttcgtcgctcaggtgctcggtgctggattgactcgccagtctttcgtagtcagactgctgcacgttgtcggtgtcctcgtagggcttccactcttgttcgcgctccagagccttctccagctcagcgatccgggcctccatgtctttctgagccttttctgtttcctgctgggctttaatcgctgccatgtctgcctcgcgctggatcttggtcgcgagcccgtcggcgtcctttttgtatgctttgcaaaatgcgtccttgtcgccgtcaaaattcatgtaatatttttcgataatggaataaaggggttgactcggtaaaaagccggtgcgctgttcaaattcttctctcatcatggtgttttttctcctttcggcgtgcccacattttctgggcacggtcttagtatagcctatgttttttaggctgtcaagctattttcgcaatatttttataaaaaacataggcaaaattattgatttcagcgtgtcgctatgttatattagtaggcggggaggtgatagcgtggcagatagccagagcgaaacacgcctcagaattgccggactcttgaagcaataccgagagcaagcgggcctcacaatacgcgaggctggcaggctgttgggaaaaagcaatcagacggtgagcgcatgggagcagggcagagggcagccggacgccgacatgttcttgaaactctgcgaggtttacaacgtggaaagtgtgagcgttttcttcggcgaagcaccgccggagcccgttctttccgttgatgaacgcgagctcttggagtcgtggcgcgaggccaccgacgccgccagagagtcagcgctcatggtacttaaaagtaacaagcgcccgctcgtgaaaaaagggaaggcaatgtgatctgggttgacttttctctcaggtcgtaggtgtgccggagttgccccttctactggagggggcagctctggttatagataaaaaaagaagcccgcacgaggcgggcaggaaggtggttaaagtatggggctttttggaaagaaagaaaaagcgacgttttacaagtttctggtggttgacgggtgcgtcccgtcaatgtctgcaccgtccaccgtgaagatctccctgttcccggatcagatagagatccggcagattatcggaggcaaagccgtggcctatctgtcatattctcaggtgacggccgccgcgaaggtcggggagcgtgagatcgttgaggcagacaagagcgtgatcggccgggccatggttggcggcgtcgtgctgggccctcttggtgccgtagtcggcggcatgtccggcgtggggaaaaagcagaaaacggtttataaagatttttttgtgataaactacacggcggccagcggggagccgtccgtgctgtcttttgaaatggtgggccctccggtcggctttgctccgttcctctcggagttgaagcagcgggccggtatcgttgaggcaccggctcaggaagggccgacgatcctataatggcgcagaaaaaagcggccccgctgatcccggcggtcatttacgcccggtactccagcagcggccagcgtgaagaaagtatagagggacagctcagagagtgccacgacttcgcccggaggaacggcctcacggtcgtgggtgaatatgtagacaaggccctcaccggcagatcagacaagcggccagacttccagcgtatgctccgggattgtgagcgcggtgtctttcaggccgtgatctgctggaaaatggatcgcttcgcccgtaacaggtacgactcggccatgtataagtacaagctcaaaaagcacggcgtccgcatattttacgcgaaggagtcgatcccggagggcccggagggcattattctggagtcggtcatggaaggatacgccgagtattacagcgaaaacctgagccagaacgtgaagcgcgggtattatgacagcgctctggagctcaaaacgctgggccagacagtcctcggactcaggaagggcgcggacggccgcttcgagttggatcccgccacggccccgatcgtgcgccggatcttcgaggaatacgccgccggggactctgcgaaggaaatataccaccggctcaatgatgaagggtaccggacgagccgtggcggcctgtttaataaaaatagcctgcgccggatcctccagaacgagaagtacgtcggcgtgtatgaatttaaggacatacgggtggagaacgcgatcccggccatagtcaatcgggaactgttcgacaaggtgcaggccatggtcgagaagcaccaccgggccccggcagctcagcgcgagacgtcgtttttgctcaccgcgaagctgttctgcggccattgtggtgagcccatgactggcgacggcggcaccagccgcaccggccgggtgtattattattacacatgcaacggccgccgggcgcacaagtgcaaaaaggagcgggccccgaaggcgtggatcgagcagctggtggttgacgagctggtggccctgatccactccgacgagtttgtgaacgaggtcgccgacaagtgcatggaataccagcagcgggagaaggacgacagcgccctccgcgcgctggaggcccgccagaaggaaaacgagaaggcgatccagaatatgctcgcggcgattgaggccgggatcataacgcccagcaccaagtcgcgcctcatggagctggaggcagagcgcggccagattgagaaagggatcgcccagcagctcatagcagagccgacgctggagcgggatcaggtggtctactttctggagcggttcagggacggggacgtctcagacgaaggttatcgggcctttttggtggacacgtttctcaattctgtgtacctctacgacgacgacaaactggtgctggtgctgaattacaccggcgagcgttgcaaggtgacgctggatctcgtggagagcgcggtcgagggtgacgggctgagcggttcgtgttttgcgccgtccagcgcggcggcgcggtcttgaacctgaacgatgagaccgtgacgcacgacggccaaaaggtgcagctcacgcgcaatgagttccgcattttgcagacgcttatggaaagccgcggcaaggtcgtcagccgcgaaacgctcatgacacgcctttgggaatacgacctgtacattgaagaaaacacgctgaccgtcaacatgacccgcctgcgtaagaagctttccggcatcggcctgaccgatttcatcacgacgcgcgtcggcagcggctatgtcgttttgtgaggtgacccatgaagaaaaaagaaagcgcgctgtttttctcatacctgtgcgcacacattttgcagatcgcgtttttgctgctgtgctttgccatttttgcggtgatcctctatttatacgatttgcccgccgatcccgttttgtacgcggcgctgctgtgcgcggcggtggggcttttaagctttattttaagctatctgcggtttcataagcagtttcgccggttggaatcggcgcttttgaatctgcccgaatcgcgcgatgacctcccggagccctcgggcagcacggccgtgtgttatgacgaagccgtgcgcatgctgtgcaccaagctcgcccaaagtgagaccgaccgccgccgtgggcaggaggagaacaccgattatttcaccatgtgggtacaccagatcaaaacgcccatctccgccatgcggctgatgctcggtgaagaagataccccgcgcagccgcgcactttccgcagagctgttccgcatagaccgctatgccgaaatggccttgaattacgcgcgcctaaacagcacgtcaaacgaccttgtgttcgccaaagtcgaggtcgaacccgtcataaagcgcgtcgtgcggcagtatgccgggcagtttgtccgcaagcacatcgcgttaaagtgcgatattgccccggtgcaggtcttaacggacgaaaagtggttggcgttcattttgggtcagctgctcgcaaacgccgtaaaatatacggaaagcggcaccgtgaccgtcaccgtcacaaagaataaggtcttgaaggtcagcgataccggcattggcatcgcaccggaagacctgccgcgcatttttgaaaagggcttcacgggctataacggcagggcagaaaagaaatcgacgggtctcggcatgtatctgagtcgccgcgccgccgatatgctcggccacacgctttccgtgcagtccgcccccggcgcaggcagcaccttttcgctcgatatgaaggaaagcaatttacaggtggagtgaccttacaaaaatgtaagctccgcctttcattttgtaaggtgaatcgatgttctgcgtccgctttttgctgtatacttttgtcaacgaattgaaaaaggagacttatttatggctgttttggaagtcaatggattgaaaaaggtatacaccacgcggttcggcggcagccgcgtgcaggcgctcacgaatgtcacatttgccgtggagcgcggcgagtatgtcgccatcatgggcgagtccggctccggcaaaacgacgctcttaaatatcctggcggcgcttgaccgtcccacggagggtgaggtgttcttaaacggccgtgcactctcaaccatcggagaaaaagagattgcttcgttccgccgccagaacctcggattcgtttttcaggatttcaacctgcttgataccttcaccctgcaggataatatttttctgccgctcgttttggcgggcaagcatttcccggagatgcaggcgaagcttctgccgctcgcgcagcagctcggcattgcagatctgctccagaagtacccgtacgaggtctccggcggccagaagcagcgcgccgccgtggcgcgtgcgctcatcacctcaccgcagattctccttgcggatgaacccaccggcgcactcgattcccgcgcgtccgacagccttttatcgctctttggcgagattaaccgcgccggtcagacgattttgatggtcacgcactccactaaggccgcaagccatgccggccgcgtactgttcatcaaggacggcgttgtgttccaccaaatttaccgcggcggttccacaaatgaagagatgttccaccgtatttcggataccctcaccgccatggcggcaggcgcgtaacgggagggcacgaaaatgaataacttatatgtgcgcttggcggcgcagaacatcaaaaagcaccgccgcagctacgtgccgtttatgctggcgggcgtttttgtggcagcggtcagctacattttaaattcgctttccaataatacggagctcggtcccacgtcgcaaatgatgttcacgctcggaagcaccgtcgtcatgctgtttgccgtcatatttttgttttacacgaacagctttttgatgaagcagcgtaaaaaagaactcggtctctataatgtgctcggcatgaacaaaggccacattgcccgcgtcatcgggttggaaacgctttttacggcgcttatcgttattgtaggcggctgcgccgtcggcattttgcttgataagctcacatttctcatcgttgccaaaatgatacgcatcacgccgaattacggctttcacatcatcccgaaaagcctgcagtacgttgctgttgtgttcggcgtaatctacgttttgatttatatctcgaatgtgtttcgtgtgcgcatttcgcgccccatagagcttctgcacggcacgaacgtcggcgagcgcgagccgaagacgaaagcgttcatggccattctcggcgtgctgtgcctcggctccggctatgcgctttccattctgtcttcccgtgagcctgtcctcgccatctctctgtttttcgttgccgtcctcctcgtcattatcggcacgtatttcctgttcacggcgggcagcatcgcgcttttaaagcttttgcgccgcaacaaaaattattattacaaaacaagccacttcatcagtgtttccggcatgctgtaccgcatgaagcaaaacgccgtcggccttgcaaatatctgcattctctccaccatggtgctcgtcattttgtcctccacctgctcgctgtggtttggcgccgaggatatgatccacacacgctacccggcagatgttctggtgagtatggaagacccgaaccacatggtcgacatggacacctttctgaccgatgagctgaaaagtgttccgggcggcagctatacgtcctatgaattcctgaccggctacgattccgcagaagaaaccgaagaccattcctctgcaatcttcatgaaagacggcaccgcgcaggtcgactccatcacgcgtaacgtgctgttcttttccgcagagacctataaccgcatcacaggcgaaaacgtgaccgtggaaccgggcacggcgctttatatgagtgtagacggcgtacctatgccggacaccatgacatttgcgggcacgacgtatacgcttttacccacgccgaagtcctttaacctgcgcggcagatatcacgcttacgtctcaaagccgtatgtcgttgttctgccggattatgcggaaaaaagtcaagtcatcacgcccaccgagtactactgcatctcgctcggcaaactgagagatgaggaacaacagacgttttacgatgcgatccgcgaagacgttacgaccatcatgccggacgaagaaagcgtattctgggacgaagacggatacttcaattttgagtgccgtgtcgaaaacacgaaggaaattcgcagcatgtatggcagcttcctctttatgggcatctcgctcggctttgtgttcaccatggcggctgtgctcatcatttactataagcagatttccgaaggtatggaggataagaaccgctttgccatcatgcagcaggtcggcctcagccaaaaggaagtaaagcactctatccatacgcagattttgaccgttttcttcctgccgctcatcacagccggcatccacgtgatgttcgcgtaccccatcatccgcgctattctgcgcgctatgatgctcagctccgaaacggtgtttattacctgcaccgtcgcgtcgttcctcgtattctccgtgctctatgcggtcgtctatgccctcaccgcaaaggtgtattaccgcatcatcagcgaagacagcaaataaagattacaagatttattcctgcaaaaagccctccgcatcccgaaaaatcggaagcggagggctttgcaatttttgtttgaagattaaacgttgaagcggaacagaacgatgtcgccgtcctgcattacatactccttgccttcgctgcgtacaaggcctttttctttcgcggtcgccatggtgccgcatgccatcaggtcgtcaaatgcaatgacctcggcacggatgaagccgcgctcgaaatcgctgtgaattttgcccgcagcctgcggggccttcgtgcccttcttaatcgtccaggcgcgcacctcgggcttgccggcggtcaggtaggagatgagaccgagcagggagtagcacgcgttgatgaggcggtcaaggccggattcggtcagacccatgtcggcgaggaaaagctccttttcctccgggtccatgccggaaatttcggcttcaatctccgcgcagatcggcagcacagcagcgtgctgctcgtcggcaatcttcttcacggcgagatagccggggttgttttcaatgccgtttgcaaagtcggattcgctcatgttggcggcgaaaatgatgggcttgttcgtcagcaggttgacggaagcgagcagctcggcttcctcctcgtcacacgccacgctgcgggcgggctttccggcatccagcgcctcgtgtacgcgctcaaagaactccagctcgctctggtacttcttgtccgccttaatcatcttcttcgtcttgtcaatgcggcggtcgagcacctcgatatcggagagaatcagctcaaggtcgattgtctcaatgtcgcgggccgggtcgatggagccctcgacgtgaataatgtcgtcgttttcgaagcagcgcaccacatgaaccactgcgtccacctcgcggatgttggagagaaacttgttgccgagtccctcgcccttcgacgcgcccttcacaagacccgcaatgtccacaaactcgatcgtcgccggggtgaacttttccggctcgtacatttctgccagcttatcgaggcgtttgtccggcacggcaacaacgcccacgttcggctcaatggtgcagaacgggtagttcgcagactgcgcccccgcattcgtgatcgcattaaaaagtgtgctcttgccgacgttcggcagaccaacgatacctaatttcatttttcgttttacctgtccgaaaacccgcattttatttggattttcgcctttcgctgaatttcttttacgccctttctacgcccttttttgtaactggcggcgtagtttgctgaaacaggcgtaccgcatttgccagtgattcgtccgtaacatgaacatacctgtccatggtggttttaatgcttgcgtgtcctaataattgctgcaataccttaggctgtacgccgcgctcaatcgcgcgtgtcgcgtaagtatgtcgtaaagcgtgcatgcaaaagcgtttgatacctgcttcatcacacaatttgtataaatgtgtgtcgtaagaactgtttttggcgggctcaccggtgcgccggttgatgaacaccaaatcgcgcatgacaagatatttcctttcgcccgatcggctgtcggtatattctaagatctgcgacagcgtttcagcttcattccggctgtctttttcttcataacagcttttcaaaatggaatatgctttgtctgtaagcggaatggtgcggtagctcttcggcgtcttaggcggtccggctcgccagcatttttggctgtgccgatactctaaactcttactgacggtcagcgtgtgctttttccaatcaatcgaatcccatgttaaaccgatcagttctgccgttcgcagtcccgtttccaaaagtagcgcatattgccgatagttctgcgaatgtgccgccgcttcaagaaatttttcctgttcttcgacagtcaaaaatttaatatcatctgctgcccgaacgggtttcgtataacgaacgccgtgcatagggtgtttgacgataatgtcattcgtaactgccgattttaacacggttcccattgtgatataagcctgccgaatggtggaacctgcataggtagtttccattcgattcagaacggctttgcagtgcatgggttttacatcggctatgcacatggagccgatcaccggctgaatgttccatttgtagcgttcctgataattccgtatcgtgttcggagcaagatcgcagatgatgttttcaacccagtatgcaaaccacttatccaccgtcatatcgggagacgtgacaatcagattgtgccgttcttcatatcttgcgtcagcaagccagtttttcgcttccggcagtgtttcaaagtatttctctttgcgcttgccgtttttcgcgtagtatcttgcggagtataaaccgtcctttctttggtaaatgcctttgccgcactctttacctttgagatttttgcccatttatcggactcctttcttattcttaaaaagagtccaacgcagttacatattatagcataaggactctgctttttcaatctcaacgggaatttttcggggtttttccggctaaaagctctatatgaccagtttatggcggatatattcttcaaattcacgccgcttcacgagcttccgcgtcccgacaaaaagcacgaacgggcaattcggctgcttcagcatggcgtctattttgtttattccgatgctgctgtattccgccgcttcttttatcgttagtgtcattttaaggtggattggtacgtgtgcttcgggttgcacacacatcggcgttacggctcctttacagtgaagatcatatgtgaagtttcgttctttgtcgctcatagtggtgtttcctcctgttctgcgaatacacgaaagatggtcatttcggtatgtaacctgccaaacggtcgggagcgagccgacgccacgggagttttaccccaactgacggtctgtcagagccattctcattgcctgcggcaccatcggagtggcggtctcttaggtgctcggactgtgactgaacgggagtatcattatgctctttgcgggtcatagcggaaccgggagctgcccggtattctaagtcgatgaatttcgctcgctgaaaagcaggtcatggcgcaccgctttgcacgctcgccgcaaagagaacgtatttgacaagtggatattcagttttcaaggttcaaaagggaaacggtgcagccgtttcgggggacgcaaaatcaaaacgcatcgcaccgcggaaaaaatacccttcactatacacgacatttttcggcgatttataaacgggggaaagtcgtttgtttataaattgtttacaattagaagcttatcgggttatcatcacaataaaaatgaaaaaggctttattaaagtaatgagggcatccctcggctaagggataccctcaaaatcactcttgcttttcttgtttacataactttagctgcgcttgatttcacgcttcttgatactagaatataaatagtacaagccaaaatgagaaattccaaatacacataagcatggtacaatagagacaagctgaaggaggatctcatatggcaaagcaacacgacaaacaatttaaacttgatgcggtccagtactataaggatcacaaagatctcggagtacgtggatgtgcagaaaatctcggcatcggatacagcacattaacaaagtggctgaaagacttccgtgaatcaggtgatattcctgttcgtggttctggtaattatgcatctgacgagcagaaggaaattgcccgtctcaggcgcgaattacgtgatgcccaagatgcacttgatgtgttaaaaaaagcaatcaacattctggaaaaatgacggacgctatttaccttgaaatgtctgagaagacgaaagctgccaaaaaggccggacgccgggtttccgtctccggaatgttgaaaatttcaggtgtctctcgctcaggatatcttgcacggctccaccacgtaattacaaaatatccttgatgagcaatttaatcctgatcgtccgaatgcagtctggtgttcggatattacctacatataaaacagcacacgctaaggcggagctgctggcaggttgaatttgggaggaatttctcattttaacttgtactgaatcttgacataggaccaaacatgtgataaaattactgaaatttaaaggagggtcctttttttctatgtctgtttttcacggacttgcgcaacctctgtacaaatgcaatagtattgtcacagtgagcaatgtctcacatattgaacgaaaaaaacaggaggaaaaattcatgacaaagttatactatcagtttccaaacacctggttcggcgactgcatgccttttggaaaaggagatcagttttatctgtttcaccaaagagataccagaagaccctgcccgtttggcgaaccctttggctgggatctggcggtgacttctgattttgtgcactatgaggataaagggacagcgctcccgcggggaaccgacgaggagcaggatcagtttatttttgcaggaagcgtttttgaagcagagggaaagtatcacattttctataccggattcaaccgggactatccaaagctgggcaaggcatcccaggtgctgatgcatgcggagagcgatgatctgctgaactggaccaagacccaggacaagttgacttttacaccgcaggagggttatgacccagatgactggcgggatcccttcgtgatctggaatgaggaaaaacaggaatacctgctggttttgggaaccagaaaggccggacctaaggaacagcagaccggacgtaccgtaaagtttacctccaaagacctgaaaaattggaaatttgagggagatttctgggcaccgggcctgtttaccatgcatgaaatgccggatctgttccagatcggtgactggtggtatcacattatttccgaatacagcgacggaaataagatggtgtaccggatgagcaaaagtctggatggtccctggatcgctcctgcggacgatgcttttgatggacgtgcttactatgcgggcagaaccttctgcctgaacgggcagcgcattctgtttggctgggttcccacgaaagaggactgcgatgaccgtggaaacttcgagtgggcaggcacatttgtggcacatgaggtgtatcagagagaggacggaaccctgggcgttaggatccccgacactgtatggaacgcctttgatgagggagagaaagctgaagatatggtgatcgataccccttatgccagacaggaacagatacttttcaatgatactacagacctattccgctttgaagcggatgtggaattttccgaaggcacccgctcttttggacttcgcttttatgaaaacgaagagaccggtcagagctatcagtatttatttaatatagaagaaaaccgttaccgctttgaaacgagtcccaacatgccctggcctgcaaaccagaacatcggactggaacggcccatcagactggaagcgggaaagaagtaccatatccaaatgatcctggatgacaccatcgcaacgatctatgtggacggagtggctctgaatacacggttttatcagaaatttggccagtccctcagcctgtttgtgacagacggaacgctgacagtaacaaatgcaggcctgtcaaaaaccataaaatgaatagtgattgacattccccaaaaagtattataatctgatatcagataccaacttgtcgaaaaagtccagtggaagctgggctttttctcgtagatatggtggtcctatgtcaagatttagtacaagttaaaatgagaaatttctcccaaattcaacctgccagcagctccgccttaatgtgtgctcttttatatactcgctcgaattcatctggtgacataaagtcgcaatgactgtgaattgtggaactgctttttctctcaaaatgagagaaaagctaattattcaattttgatccggtatccagaaagccgggtacatatcacaagctgctgcgttttcctttacttattgttttagaaagtttgcaaatcgcataaagctgaagtaagcagaaagggttcagggatttccctgataagtgtcgttgtggtatcacaacggcgatgcttgcaatataattatttcggcgacaggatagtatttttgaataaacatggttttctcttttctttgtaaatttaactgtggtaaatcaaaaattcttttctagttgctcagttcctaaggtataatgaaggggatcggtctgacgaggcaatgcatgagctgctacgctcgtctagcaaactgtcagccgcctctcattgtatcgttcgatttatgcaggttgaattaaaggagtcaactcccacattcgtgtaacaacgcaagctgaatcggcactgagtaacagcggtcaccgaacatgattaggaggttgaaatccatgacaaacaacatcatcacagctgtcggaattgacgtctccaaagggaaaagcatgattgccatacggcacccgggtggagaggtcttgcgtatttaccgcacggaacaacccaaacaacaaaaaataaaaacaatcgccgcaacacactcttttttcgggtagtacaggaagtaacagggggtaaggtgtggagaggggggagcgagcagcgaccgcttcgctcctgcaaaagggcagaatttccctaaggcgtcccgttatcttttttgattgtgtcaatacagcgaatatcggttacaaaattcaagtgcccggaacaccgaattcatacccaaaacataaaaacagcgtttctattctttctttttagaaagttagaaacgctgcttttataatgtactgattttgctgtttctctaatgtcaaatggctcttaatcgaagaattttgaaggcgtatcataaacaaattaaaatgcgttggactctgttttttaatatcaaatctacgcctatttctacgcccaaatgatatgaaattgtatggctctacatggagctttatgcttgcataattttagaaaacgcagtaatcatgccggtttacggatttatatgatagtatatagatatatgaaaaaggtcggtctgcgacgatacctaatttcatctataaaaccatctttctttgaatgtagtcatgacgtaaacttatacttaatcagtatagcatattccccctgcgcctgcaagaaaattctgtgatttacaggggaaagtttttttaaatctgttgtggataaaatcaccatatcacgtccatgcagtggaaagcaaaagaaaatcatgttgcttcaagacgaactgtttttatagaatgaataaaattatatcaacaaaagtctagatactattgacaaataccttgctaatcagtatccttaaaacaagagttatcgtatattaaaccgatactttacagtttggggtgaagatcgatgaaacggattttgtccatggaattaaaaaaagcgttttggaacaagagatttttattttctttatcagtcgctctttttttatctttattaagcggctttttacaagtccggggatacatcatcagaacaaggtttctgaatacaccagcataccaaaatgttgctggctggggaaaagactaccacctcagcgccgagaccatggcagatttctggattggcatggatttttcaacctggtgcgccacggcatttttctttttactgcccttgctggctgtcttaccttatggcagctcgctccaccgggaatacaaaagcgggtatcttaatttgatcacgccgcagatttcccagaagcgctattttgcggcaaagtttttggcgtcgtttctgtccggcggcgcagtgatcgttcttcctatgattgtcaacgtgatttttgtcgcctgtacggtgccgatgcgtctaccgtccgtattggaagtgatctataacggcgtatacgggtttgggttatgggcggaggttttttatacgcacccggttctttacattctgctctatctcttgctggattttctcttttccggcgcgattgccacaattcccatggcactttacaaactgaaaaacagaggactggtcttaattcttccgtttctcacgctgatggtttttcacattttcctttccctgctttatcggttcattcctttctgcctgtcgcctctcgatttccttcgcgcggtaaatgtttctccgtatggcgcaaatttatggattgtagccgcagagtttatactgcttcttcttccggggatgctcaccgttttggcttggagaaaaaaagatgttttgtagaatctttgctttggacataaagcgagccatactcggcagatggaaaagattttcggttgcactgctcttttttgttctggtagcatttgcatgcaaaatcagcttttcaaacgcatacctgcaaagcccgcagctttctccttttgcggcgcttacgttaggtgattttctgctctatgcctttggcggctgtgacggcgtccgcagcgcaagtttatttgggtttgacagaccgtttgctattccttttcaatggcttttactgattttacttgccatatatattaactttgacttgactgaggaaagttctgcgggcgtgaatgtacaattacttcttcgtgccggtgataaaaagcaatattggttatcgaaaattctgtgtattacgatcagcacaagtttgtattttgtgctgggtgtgattgtgacacttgggtgcggttttgccttgggtggagtttcttctttagaaatagataagttaattttaaacgtgatgaacctttcttctatggtccctcgagaagccaccagccccgcttttattccgaccttgttgatggtatggtttgccattctaacgatcacgttgcttcagcagcttatttcactattcatcaaaccgattggaagttttttagtcatggctgtatttttgtttctgtctgcctattttatgaaaccttttttctttggcaattatgccatgatgattcgaaacgccctcctttgtgagggcggagtcgatgcggcggaaggcattttgattttgtcgcttgtcagtttagcatcgatagtggggggctgcgtcgtttacgaccgcaaggatattttaagcaagggggaatcctgatgtttcttgaagtgaaaaacgttacaaaatccattcacggcgatgttgtgatcaaaaacgtgtccctttgctccgagcgcgggcgtgtgatcggcctacgtggaattaatggttccggcaaaacgatgctgatgcgcctaatcagtggattgatccgccccacgaaaggacaggttttgatcgacggagaagtcgtatcgaaagacataccgtttccgagatccttaggcgtgctgattgaagggccggcctttttggatgattattccgccatggataacctgaaactcatcgcataccccaaaggaaaagtgacagaggatgagatcagggccgttttatcggaagtgaggctggatccgaaaagccgtaaaaaatacaaaaagttttctttgggcatgaagcagcgcctcggcattgcggcggcggtcatggagcacccggatttgattctgcttgatgaacctacaaatgcgctggatgaatccggtgttgacatgcttaaggacatcgtgaaaaaagaaaaggaacgcggcgcagtcttgatcgtttcctcgcatgaccgggatattctggaggatatatccgatgaaatttacgatttagagcagggagagatcgttcggcacagcataaagggggagaagcgaagtgaaggctaagaaaatcttactatgcgcagtcagtctggttttgcttctgctcatcgtcgtgcgcatcgtccatgtgaacaccaatgtattgacgattccggaagagcgctatgcgcaaaaccagtgggtagagctgaacggtgcctttcaggaaatggatgatgaaaacacggagggctattctgtaagaatactcggtgcggagcagctgacctacgatgaatttctggagaaatacggcgcgtcggaaaatcccccggagggaaaggacgatatagagactgtgctcgatgtagagtatgaatttcgcaatgtaggcaattcagacggctacctcctgctgatccaatacatgattgcagggccgtactattcgctgattttcgattcgaccttgtggtctgtatgcacgccgaccggtgagggacaactcgcgaccgccttgcaggaagataccacgtattccttccatgtcccgtacatttttgccggcggtttttctaaagacttggatggcgaaaagctcgccgctgtcgtttcacgcgtccctgtcaaaaaaatgattgaatttacgttgtgatctgcttaataaattaacaaaaagaaaacgggcttctgccgaattgccgcggcggggcccgtttctttatgtgtgaacttgcgatgtgtgcaatcttgttctcttatgcgttttcctgttctgcgagttttctgcccatgagcacgcccatgcaagaggccatcatcaggccgcgcgtccatccgctggcgtcgccaaggcagtgcaggttgtgaatgcttgtgttgaggtccgtgtccatcttcacgcggttgctgtaaaacttcagctccggcgaatagagcagcgtctccacggcggcgaagcccgggacgacgtgatcgaccgcctgaatgaagttgatgatgttcaccatggcgcggtacggcatggcagaggtgatgtcgcccgccaccgcgtccggcagagaggggcgcaggttcgagcgagaaagctctttctgccacgtgcgcttgccgtccagaatatcgccgtagcgctgcaccaaaatgtgtcccgcgcccaacatgttcgtcagctctcccaccttctgcgcgtattcgatcggctgattgaacggctcgttgaagttgtgggagcacaaaatggcgaggttcgtgttatcggattttttatctttataggaatggccgttcacgacggcgaggttgttatcgtaattttcctgactgacaaagccgcccgggttctggcagaatgtgcgtaccttgtttttaaacggcttcgggtagccgatgagcttcgattcatacagaacgttgttcacggtttccatgatctcgttgcgcacctctacgcgcacgccgatgtccactgtgcccggcgcatgggcgatgccgtggcgggcgcagagcttgtcaaaccaatccgcgccgcgtcggccggctgccacaacggtctgcttcgcgtaaacgtcgtattcgttctgaccctccgcaacgtgcacgccgatgcaggtgtcgtccttcaaaatgaggtcgctgcacgcgcagccgaagcgaatctccacgccgttattcagaagatattgctcaatcgcgtaataaatctcctgcgccttctctgtgccgaggtgacggatggggcagtcaacaagcttcaggccggtctggatggcacgcttgcgaatttctttgacggcttctttttcgctcacgccctccacgcgcgtgtccgcgccgaactccagatagatggaatccgtgtattcaataagcgactgtacggcgtcttcgccgatcagctgaggcaggtcgccgccaacctccgggctgagggacagcttgccgtccgaaaacgcgcccgcaccggaaaagcctgttgtaatatggcagtacggcttgcagttcatgcagcggccggtctgggccttgggacatttgcgcgtttcaatggaatggcctttttccagcagcagaattttctccttgctgccgcggcgcagaagctccatcgcggtaaaaatgccggcaggaccggcgccgatgatgacgatatccgtgttcatgtttgaccccaactttctaaaactaacagatgaatttgcgtatgaatttcaaaacacaactctatgcaagacccggtttcgggtaaatcggcacataaaaaggccgccctgcacccgaacgtatacacgaagcccgtaagcggcttcggtatagtcggcacacaaggcggccggtagagacattcacccaagtcgtgaatttatatgaccgatcagcaattcagaattatagcagctaattaaacttctgtcaagcttttttgcaggcttttgcaaaatatcttgcaaatttacttatttgatgaacttcttgccgtcgtaaatgaagatgcccgcgcccgcgccggtctttttgccgtccagaagccattttttaaaacagcggcgctgggtggtgtcctccggcagctcgctgttcggcttctcaaaatcctttgcgaacacacgccacttgtcgtggaacacatcgtattcctcgctgtcgtaaatatagaagtcaccgatgaaatcgaccatattgagcgtctcgggcagaatttcgcggttcttcgggaacaaaagccaggagtggcagcggaataccatcggcttgccatcgaggtcttttttgtaaaattcgtaggcttttttataagattcgatgcgcgccgcgcggttcaaagaaccgcaggacggaatgtgcatgttgtaaaccgtgtcaccgggctttaccgtgtaaccgccgaccgtcacgggcgtgtcgccggagaagtgtacggcctcatactgcaaacggcccagcttaaagcggtgcatcgtgtagaaccacgggtaccagcttgcgacgaatgtgccccaaatgccgtatacgtcgtggcactcgataagcttgaattttaggtcggcgatggtgtcccagaacagctcgtccgtcaggcccgccgctctgtaattttcgcgcagacgttcgcttgcaagcgcaaggaacaggaaatccaccacgtggcggtgcagccctgtccgctccgaaagcgcgtccatgtgcggcacaatgggcttccattccgcgccgtatgcgccgtcaatgccgtaatctttaaaaagcagcgtctcggcagagaccagctcgtcaatcgtgccgggtgtcgtcacgagcgtctcgcagttctcgcgcagagaagcgcggctcgcttccggcagatcaaggttttcaataaagcaatttaaataatcgagtgtgtacatacagatcctcccaaagcagcgtttttccatagaaacgcgtttatctcattctatcatttgtatatgcgcggcgcaatggactttttgcacagcagaacacacctgtttttgtaggaacggtgcacagcacctgtttttgcacggttttctccgctaacgctcaaaatacaatcacctttttatcacattttgtaagtaaaatttaagaaacaaaacaaagaggagggcgaaagccatggcggactataccggcatatttgagcgcgtagagcaaaaatatctgctcgattccttacagtttgaggcgctctgggcggttttggagccgtatatgcgccccgatgaatacgggcgctccaccatatgcaacatttactttgacaccccgaattatttgctggcgcgactttcgggcgaaaagcccgtctataaagaaaagctgcgtttgcgtacctacggcgtgccgaaagcggaaagcccgtcgtttgtggagctgaagaaaaaatatcagggcattgtctacaagcgccgcatcgtgatgccctacggcgaagcgtatgactggcttgtaaacggcaaagcgccgaaagagaacagccagattgcaaaagagattgcatggtcactgcactattacggcgatttaaagtccgccatggcgctgtgctacgaccgtgtggcactttacagccgcgaagacagcggcctgcgcatcacattcgataccaacatacgctttagagagaaaattaccgacctgcgtcagggggacgacgggcaactgctgttagagcccggcgaaacgctgatggaaatcaaagccggcggcggtctccccacatggctcaccgatatgctgagccgctttagaatttaccccgcgtcgttttctaaatatgccagcgcctataacacccacggcacgcacatcgtgcatgcatcctaaataattcatttgatttcagaaaggatattcccatggaaaccgtgtttgcaagcttcacctcgtccggtatcactgtatcttcgtttttgctttgctcgctcgtcgcgctgctttgcggcgcactcatcacgtttacgtatacgcgccgcacgcgctttacgcaaagccttgtgctcgctgtcattttgctgccgtttgccgtgcagaccgtcattatgctcgtcaacggcaacgtcggcacgggcgtcgcggtcgccggcgcgttcggccttgtccgtttccgctccgcacccggtaacgccaaagacatctccgtcatcttcgctgctatggccgtgggtctcgcctgcggcagcggctatatcgcgctctccgtgctcttcacggtcattgcgtgcgccgtgctgtatctgctcgtcttcttccatatcggtgcagaccgcagcggcgaaaaagagctcagcatcaccatccctgaatcgctcgattacaccgaagtgttcgacgatattttcaaagaatacaccatccacgcagagcttacggaagtcaagaccgcaagcctcggcagcctctataagctgcactatcgcgtgcgccttgcggacgaccgcaacgaaaaagaatttctcgatgcgcttcgctgccgcaacggcaatctcgaagtgcgctgcggccagccgcatactcccgtggaacagctgtaaggaaaggagccttcctttatgaaaccgaatcgtttatccacgaaaaaacacaccctgcgctttgctgtcattctctccgcactgatcttagcgggttgcgcctccacacagtcgaccacatcgtctacgtccgcatcttccgcttcctctaccgtgagcacggtcagcacctctgaggaaagcggtgcagacgagaccgattctaccggcggcgcgatgaacggcaccatcggctccgtcatcgaagcaaatctttccttcaaaaataaggatttctacatcgattacagtacggaagacaccgtgaagatcgacctttccgcgccaaaggaagcagacggcgttaaggtttccggcagcacggtcaccattacggaagcgggcacgtatgttctcagcggcacgctcacggacggccaaattatcattgatgccggcgacgaggatgatgtgcgccttgtgctcgaaaacgcgagcatcacctgcacaacgaccgcgcctgtctacgcgaaaaacgccgataaagtcattatcagcctgcccgaaaacaccgaaagcaccgtgaccgataccgtcaccggtacggacggcaacgatgcgcttaccgccgcgattttcgccaaatgcgacctttccgttaacggcacgggcacgctgaacgtcaacgccaacgcaaatgacggcatcacgagcgaagataaattgaaaatcaccggcggcgttttgaatatcacttcggcagacgacggcctcgtcggcaaagacgctgtgctcattaaggacggcaccgtccatatcacggcttccggcaacggtatcaagtccaccaaatccgaggccgataaaggctatgtctatatcggcgggggcactgtgaacatcaccgccgagcaggacggcattcaggcggagaccagtgttctcatttccgcgggcgaagtaaatatcatcgcaggcggcggcgcgaatggagagcaaaaaacgggcaatgctatgtttggcggcgcacagagtacaacgacggacgaaaccctgtctacaaagggtatcaaggccgaagccgcgctcgacatcacaggcggcaccgtcacgctcgattccgcagacgacagcctgcacagcaacgattcgatgaccgtttcaggcggcggtatcaccgtaaagtccggcgacgacggcctgcacgcagataacacccttacgatcgaggatggcaccatcgtggtggaagagtcctgcgagggccttgaagccatcgacctcaccatcaacggcggtacgatcgatgtcaccgcaagcgacgacggtctgaatactgcaggcagctccgttgacggcggctttggcaccgcgggtgcagatacgctcaccgtcaatggcggcacgctcaccgtaaacgcctccggcgacgggctcgattccaacggtgcgcttacgattaacggcggtacggtgtacgtcagcggccccaccggtgacggtaacggcacatttgactgcgacggcgtgtttaccatcaacggcggcgttgtgctcggcacaggcagctccggcatgctgaagacccccacaacggattccaaacagaacacgatcagcgtcagctgcaccggcagcgcgggtgacaccgtagaagtgaagggcgcggacggcaacacgctcgtttccgccgtggctccgaaggactttacgaatgtcacgttcagcacgccggacattaccgagggcgaaacgtatacagtctatgtaaacggtacagaaaccgcgagcgagacctgctccggcgttgtcagcggcgctacgggtatgggcagctttggcggcggccccggcaatatgggtggtcgggctccaaacggcggtatgggcggccaaatgccgaacggcaacagcgatggcaccaccccgccggaaatgccgagcggcgatagtggcataaccccgccgaacggtaacggcggcacgcctccgcagatgccgggcaacacctccgatacctgattttctcttgttttcctgtgcgtcaaaatatgaacttttcgtaacaatttcggctttttcgcaaaaacccgcacaccttttgtcaaggtgaaaaggaacctgtcaatttccgtcgaaaacgcgcgaacgattctatttgaactttcaagacccccttgctataatggcattactgacagatttaccacccatccgacagcctccgctctaaaagtacagcggggctgccgggccggatcaggaaggatgagagattttgagtgaacaggaattgatgctgcgcgtagcagccaaacacggcgtagacggtgaaacggtccgcgaggagattggcaaagcccttcgcacggcgaaaaattcttcaaatgccgcagcccgcgcgttttggagtgccatccccgaagatgccagcgacaaagagatcgtgcagtgcatcgccgctctcttgttgggtagcgccgtgcaggagcaagactgaacagcattatccgtaaactcaaaaaacacggtgcagccgaaatgaagctgcaccgtgtttttgttgttttgcaaaatcacagaaataaaggtcgcgcttttggctcggcttaaaacggccggttcgtgccttgtcacgctatcctctatctttttctcggtctcctgtccgcgaatggcgaagtaagagtttactttatcactcttgcccttacaaccggcgaaagtgctgccagcttttcgcgcacgtcctccgtcacgtcacccgtaacgtccaaaatggtgtatgcccagtcgccacgcgatttcgagagcatgttctcaatgttgatgcccgcttcaccgcacacctgtgtgaacgaaccgatggtatttggaatgtttctgtgcgcaaggcaaatgcgtgtgtccgcgccgcgtgccatggaaatattcgggaagttgacggcatttcggatgttgccgttttcaatgtaatccttcagctcctctgcggccatcacagcgcagttatcctcgctttccggcgtggaagcgccaaggtgcgggatcgcgatgacgttttcgaccccgagcagcgcgtcatccgggaagtccgtcgcatacgcggcaacggtgccgtctgcaagcgccgccagcatcgcgtcggtatcgacgagcgccccgcgcgagaagtttaagacgcgcacaccttttttcacttttttcaaagcgtccgcgcctatgagtccgcgtgtcgagtcatttagcggtacatgtattgtaatgtaatcgcacttttcaaaaatctcatccacggaagcggccttcacaatgtcgctcgaaaggttccatgcagcgtccacggaaaggaacgggtcgaagccgtatacctgcatgccgagcgtctgtgcggcgttcgcaacgagcacgccgatcgcgccaagaccaatcacgcccagctttttgccgagaatttccggccccgcaaacgcggattttcctttttccacctgcttcgaaatgtctgccgtgccttttagtgtctgcgcccattcaatcgccgggacaatttttctcgacgtcaaaagcagtgccgccagcaccagctccttcacggcgttggcgtttgcgccgggtgtgttgaacaccacaatgccggcttccgcgcacttttccacgggaatgttgttcacgcccgcgcctgccctcgcgattgcgagcaggctattgggcaattccatgtcgtgcatggcggcggagcgcaccaaaatgccctccgggttctcaatttcggcagcgtatgtatagttttcgcccaaacggtcggtgccgagcgggctgatcttattgaggcaaagtatgttgtgcatcaggcattctccttttcaaagttctccataaactgaacaagcttctctacgccctcgcgcggcatcgcgttatagatagacgcgcgcatgccgcccacgctgcggtggccctttagattcacaaagcccgcagcggcagcttcctgcacgaattttgcgtctaaatccttgtcgcccgtcacgaatgtcacgttcataatggaacggctttctttttcggcgcagcccttaaaaagttttgagcggtcgaggaaatcatagagcagcgcggctttttccacattgcgtttttccatcgccttcagcccgcctacttcgtttttcagccattccaaaacgagcttgcacatgtaaatggagtaacacggcggcgtgttgtacatgctgtcgctttccgcgtgcgtcttatacatgaacatcgtcggcgttttttcctgcggctcgccgatgagatcctcgcggatgatgacaatggtcaggcctgccggggctacatttttctgcgcgcccgcatacaaaacgccgaatctcgaaacatcgatcggtcggctcagaatgcaagaggaaatgtctgccacaagcggcacgtcacccgtctccggcagcgcatggaataccgtgccgtagatcgtattgttcatgcagatatggaagtagtccgcgtccgggcggaactccttcgggtcaaggtcgggaatgcggctgaaattctgctctttcgaggatgccaccactttgcaatcgccaaatcgcgcggcttccttatacgcttttgtggagaactggccggagagcacatagtcggccttgcggtttttcgtcatcagattcagcggcaccatcgcaaactgcgaggatgcgccgccctgcaaaaagagcaccttgtagttatccgggatctccatcacctcgcgcagaaggctttccgcgcccttgatgatcgcgtcatagaccttagatcggtgtgacatctccatcacggactggcctgatccttcatagtcgagcatttcggcagcggctctcagaagaacgctttccggcagcatagaggggccggcagagaagttgtacacacggttcatagtaagatcttcctttctttggcgcgttaaatcgcaccggataataaaatagatttcccttgctttaccgcggtttcttatagcactgcggtaaagtttcccctattatacatacagcaaaacgcaaatgtcaagtataaatttgtttttggaataaaaacaggtgtatctaatcggtggacaaatatcgaatgctgcatttcgttcgtgccccatgcacaaatacaaattaattgtccaccttctgctgacaagtccgcatttttcggccgcaaggcaaaaaacgcggcaaaaaaacactttaaaaactatctaaaagtacagaacattttccataacggattgattttttggaaatctttttgtataataacagaaacaaggacactttaggctcaaaaagagcaaacagacccgtgtccgaactcggcgaaagggtgaagctttcatgaaggtacagaatattgtcaacattttaaaggcggaaatactggcggagggcgaccttcaggaagaggtcaaaaccgcatgcggcagcgatatgatgagcgacgtgctggcgttcgtcaaggatcagtccgtgctgctcacgggccttgtcaatccgcaggtggtacgcacggcggaaatgatggatatgcactgcatcatctttgtgcgcggcaagcgcccggatgagaccgtgttgtcgctcgcacggcaaaaggacatcaccatcctcgcaacgccgtacagaatgttcacggcatgcggcctcctatacgaaaacgggttagaaggcgggtgtgacgtatcatgagtatgctgcaacttcggtatacagtccccggcgatgattttacccgcgcgggcgaagcttcgggcgatgtaaagcataaattaaaaaagctcggctataacccatctgccattcgccgcgtttccatcgccatgtacgagggtgaaatcaacatggtcatccatgcgggcggcggcgaagccaatgtggacgtggacccggataaggttgtcatcgtgctcaccgatcacggtcccggcatcgcagacgtggaaaaagccatgcaggagggctggtccaccgcgccggataacgtgcggtcgcttggttttggcgccggcatgggcctgccgaacatgaagaagtattccgatgaaatgacgattgattcggtcgtggggcagggcaccacgctcaaaatggtcgtttacgcgcagagcgaaaaatcgtaggctctgcataggataatggaggaggcgcgttagattgggtatttttttccactcggtcacgctcgatgaaagcaagtgcgtaggctgcacaaactgcatcaagcgctgcccaacggaagccattcgcgtgcgcagcggcaaagcggtcatcatgagcgagcgctgtatcgattgcggagagtgcatccgcatctgcccgcaccacgcaaagcgtgcaaagcatgaccatctttccatgctggaaaagtttacatataaaatcgcgctgcccgcaccgtctctttacgggcagtttaataatttggacgatcaggattatgttttatccggccttaaaaagcttgggttcgatgacgtcatggaggtttccggcgcggcagagcttgtcagcgaggctacccgccgcctgatggatgccggcaccttgcagcgccccgtcatcagctcagcttgcccggctgtcgtgcgtttaatccgcgtccgcttcccggatctctgcgaccacgttctgccgcttttgtcgcccatggagactgcggcaaggattgcaaagcagcaggctgtgcagaaaacgggcctgccgaaagagcagatcggctgctttttcatcacgccgtgtcccgcaaaggttacggatattcgcatgcccatcggcatcgaaaagtcggaggtagacggcgccatcgccatcagcgaaattttcccgcagctttcaagccgcatggataagctcacgccaaaagatctcgaatcgctctcaaattccggcattatcggtgtcagctgggcgacctccggcggcgaatcttcggcgctgttaaaagaaaaatatctcgcggcggacggcatcgaaaacgtcattcgcgttttggaggagattgaagacgaacgcatcggcgagctggatttcatcgagctcaacgcctgctccggcggctgcgtcggcggcgtgctatgcgtcgaaaatccgtatgtcgccattgcaagattgcaaagattgcgcaaatatctgcccgtctcgcagaatcacttggagaaaaacaaaaccgtcccggaggaaatgaactggggcagcgggctagagttttccaatgttttaacgctttcggaggatatttcccgcgccatggaaatgatgatggagatcgacaaggtggaagcggagctgccggggctcgattgcggcgcgtgcggtgcaccgagctgccgtgcctttgcggaggacaccgtgcgcggaagctgccgcaaggaagactgcgtgtttatcctgcgcaaggagatccgccgttttgcggattcgctctcaaatttagaccttgacggcggcaaacgcacaagtgatgacgaatagggggaagtaaaatgcagataggggaaatggccgaagcactcggctggaagcttttgaccgaaaatacagatacaacgcgcgaagtaaagggctgctactgcggcgatcttttaagctgggtcatgggcagagccaaagcggacgacgcgtggcttaccgtcatgggcaacgtcaacgccatcgcggtcgcatcgcttgccgataccgcaggcatcatccttgtggaagatgccgttttggatgcagatgccaaagcgcgtgccgagcagcaggaaatcgccgtgtacggcacatccctgcctgcctttgaaatcgcgctcaaaatcgcttcattactggggtgaatgtatgaacagctatcggtacgacctgcacctgcactcgtgcctttctccgtgcggcgatacggacatgacgccgaacaacctcgtcaatatggcggcgctgctcggctgcgacatcatcgcgctcacggatcacaatacctgccgcaatacgcccgccgctgtaaaggtggggcaggccacggacgtgctcgtcattcccggtatggaactctgcaccgccgaagaagcacacgtcgtctgcctgtttgaaacggtcgaggacgcgctcgcgttcgataaatacgtctgtgcgcacattccaaaggtgccgaaccgcccggaaattttcggcgagcagtggatcttaaatgaggacgacgagaagatcggcgaaatttccgagcttctcattaccgcaacagacatcagcatcaacgatgtgcaggcgctcgtgaaaaagtttaacggcgtggcgtttcccgcgcatgtcgataaagacgcgtacagcgtcaccgcgtcgctcggtgctatcccgccggaagcgcagttttccgcagcagagctgtcccttactgccgatgcagcacagcagcggcttctgcacccggagctcgaaagcatgatgcttctgcgcagctctgacgcgcattatctgcatttgatgcccgaagaacaccaaacggtggagctgccggaaaaaaccgccaaagcgcttttagatgtgctgcgtgggtgcggtgcaggtaaatttcaagctttataaggaaaaacgccaagctgtgtgctatgcgaatttcgcataacgcacagctttcgtcatttttaccaacatggctaaatcatcggattttcgttaaattgcataaaatttcgttaatctcgctcctttgaaaattagctgtttctaactcgtgcgaatcgggagaaaacggaatagatatacttttatcgatataaaatatcgataaaatgagtgatatttcagccttttcacggcaaatctatactgcttttgtatactttaacaaatgcccgaaaacgaaatttttgtgctgtacgctaaaagaactgacaaaaatttcgtcatgggtttgacaaactttcgtttttaattcttttttagaattattacgtatatcgattttgatataattcataaagatgtatgaaagttctccgcccaataggggcgcagaccgaaccatacctgaatttaaacttaattttatcagggaggaaataaaatgcaaaagcgtatcagtaccattccgtttaccgatactcccgagcagcatgagaagctcctcgcagtcatcgagagcctcaagaatgaaaagggtgccgtcatggctgcactgcacaaggcgcaggatatctacggttacctgccgatcgaagtgcagaaggagattgcacgcggtctcgatgtatctctcgaagaggtatacggcgtttccacgttctattctcagttctcgctcactccgaagggtaagtacaacatttccatttgcctcggcaccgcatgctacgttaagggcgcagataaggttcttgaccgtctcgttgcaaagctcggcatccagccggaggagtgtacgccggacggcgtattctcgctcaccgcatgtcgctgcatcggcgcctgcggccttgcaccggtcctcaccgtcaacgaagacgtttacggccgtctcgttcccgaggacgtggataagattcttgcaaaatacacagcgtaagccatgcgtgagctttcgctgaatgtgatggacattgtgcagaactccgttcgcgcgggcgcatcgcttatcacggtgcaggtcgcggaatcgaaaaagcacgacaccttaaccatcacgataacggataacggctgcggtatgagtgcggagcaggtcaaaagcgtcatcgatccgtttttcaccacacgcaccacccgcaaggttgggcttggcgtgccgcttttcaaaatggaagcggaaatgacgggcggctcgtttcagattgattctgaagaagggaagggcaccaaagtcacggctgtgtttcgtccctcgcatgtcgatatgatccccctcggggacatcgcgtccgttatccatcttttgatcacctgcaatcccgaactcgattttctctttacccacagcgttgaagaaaaagagatcaccctcgatacccgtatgctgcgcgagcagctggagggcgttccgtttacggagcccgcggtatcggcgtggattcgggagtatcttgcagaggcggaggaagagcttaagtagctctcgtagtatcaatgcgcaaggcgcagaaaggaaaagccacatgaaatcattagctgaacttcaggcaattcgagatagagcaaaaatggcggtcaacgtccgtgaaaattccgaagcgaaaacacgtgttctggtcggcatggctacctgcggcatcgcagcaggcgcaagaccggttctcaccaccatctcggatgaggtcaataaacgcgagcttcacgacgtcttggtcacgcagacgggttgcatcggcatctgccagttcgagccgatcgtcgaagttatcgatgaaaacggcaccaagactacatacgtaaaaatgacaccggaaaaggcactgcgcgttgtcaacgatcacatcgtcaacggcaatgtcgtcacggaatacaccatcggtgcaaatcagaaataaggaggtaaaactatgtttcgttccaatgttctggtctgcggcggtacgggctgcacgtcctcgaacagcgaaaagatcattgaaaagctgaaggaggaaatcagcgccaaaggtctggatcaggaagtcaacgttgttcgtaccggctgcttcggcctgtgcgcactcggcccgatcatgatcgtatacccggagggtgcgttctatagccgcgtcaccccggaagatgtcccggaaattgttgaagagcacctgctcaagggacgtatcgttcgccgcttgctctacaaagagacggtcgtcgacgaaagcaccacaaaatccctcaacgagaccacgttctatgcaaagcagatgcgtgtcgcactgcgcaactgcggcgtgattaacccggagcagatcgacgagtacatcgcgctcgacggctatcaggcaatcggcaagattctcacggagaagatcccgccccagcaggtcattcagaccatgctcgattccggcctccgcggtcgtggcggtgcaggcttccccaccggtcttaagtggaaattcgcagcggcaaacgatgccgatcagaaatatgtatgttgtaacgccgacgagggcgacccgggcgcattcatggaccgttccattctggaaggcgacccgcacagcgtcatcgaagccatgaccatcgccggttacgccatcggcgcaacgcagggttacatctacatccgtgcagagtaccccatcgcggttcaccgtctccagattgccatcaaccaggcgagagaatatggcctgctcggcaagaatatcttcgattccggctttgatttcgaccttgagatccgcctcggcgccggcgcattcgtgtgcggcgaagagactgcgcttatgacctccatcgaaggtaagcgcggcgagccgagatgccgcccgccgttcccggcactcaaaggtctgttccagaagccgaccgttctgaataacgttgagacgtatgccaacatcccgcagatcttcctcaaggggccgcagtggttccgcagcatcggcacagagaagagcgcgggcaccaaggtgttcgcactcggcggcaagattaacaataccggccttgttgaggttccgatgggtaccaccctgcgtgaagttgtcgaagaaatcggcggcggcatcccgggcggccacaagttcaaggctgcacagaccggcggtccttccggcggctgcatcccggcgtccctcatcgatacacctatcgattatgacagcctcatcgccatcggctccatgatgggctccggcggcctcatcgttatggatgaaacgacctgcatggtcgatatcgcaaagttctttcttgagttcacggtcgatgaatcctgcggcaagtgcaccccgtgccgtgtcggcacgaagcgcctgcttgagatcctcaacaagattacaagcggcaagggcacactcgaagacatcgataagctcgaagagctctgctactacattaaggaaaactccctctgcggtctcggccagacagcgccgaacccggttctttccacactcaagtattaccgtgatgagtacattgcgcacgtcaccgagcatcgttgcccggcaggtgcctgcaaggccctcacgaattacgtcatcgatgcggacaagtgcaagggctgcacgctctgcgcacgcaactgcccggtcggcgccatctccggcaccgtccgcgagccgcatgtcatcgatacgcagaagtgcatcaagtgcggcgtctgccgtgaaaagtgcaagttcggcgccatcgaaaagaagtaaggaaggaagttgagaatagcatggatatggtaaatattaagatcaacggcatgtcctacgaggtcgctgccggcagcacgatcctcgaagccgcaagagaagccggaatcgacattcccaccctttgcttcttgaaggacgtcaaccagatcggcgcatgccgtatgtgcatggtcgaagttaagggcgcaaaatcgcttgttgccgcctgcgtgtacccggtaaacgagggcatggaggtcttcaccaatacgccgaaggttcagaaatccagaaaaatgacactggagctcttgctctccgtgcatgaccgcaaatgtctctcctgcaagagaagcggcacctgcgagctgcagaagctctgcaacgatatgggcatcgacagcgagaaccgctacgaaggcgccgttcccgccggcaaaaaggattacagcaccctgcacctcgaaagagataatgcaaagtgcatcctgtgccgccgctgcgtggcagcctgccagcagcagcacgtcgccgtcatcggcgcgaacaaccgcggtttcgataccgagatcggctgcgcatttgagatgccgctcagcgaagtggcctgcgtttcctgcggtcagtgtatcgtagcctgcccgacaggtgccctcaccgaaaaggacaatacccagcaggttatcgatgccatcaacgatccggaaaaggtcgttgtcgtgcagacggctccggctgtgcgcgcagcgctcggcgaagagttcggtatgccgatcggcacgaacgtagaaggcaagatggtcgcagccctgcgccgccttggcttcgataaggtctacgataccgatttcggtgccgatatgaccatcatggaagaagctaacgagttcattgaccgcgtgaagaacggcggcaagctgccgatcatcacctcctgctctccgggctgggtcaagttctgcgagcactacttcccgagcctcacagaaaacctctccacctgcaagtccccgcagcagatgaccggtgcgctcatcaaaacgtggtttgcggaaagagaaggcatcgatccgaacaacatcgtttctgtttccgtcatgccgtgcgtcgcgaagaaattcgagatcaaccgtgacgacgaagacgcagccggtgtgccggacgttgatatctccattaccacccgcgagcttgcccgcatgatcaagatggcacagctcaacttcgcaagactgccggaagaggattttgacccggttatgggcgtttccaccggcgcagctacgattttcggcgcgacgggcggcgttctggaagcagcgctccgtaccgcagccgatgtgcttgagggcgtcgaccacgataacatcgagtacaaagagattcgcggcacgaagggcttcaaggaagctgtttacaaggttgccggcatggatgtcaaggtcgctgtcgtcagcggtctgaataacgcaaacgagctgctcaagaagatcgaaagcggcgaagccgactaccacattgtggaagtcatgtgttgcccgggcggttgcgtaaacggcggcggccagccgattcagccgtctacggttcgcagcttcacagacattaaggccctgcgtgcaaaagccctctacgatgaggacgcggccaagacgctcagaaagagccacctgaaccccgtcgtcaaggagtgctacgaatggatgggcggcgagcccggctgccataaggcacacgagctgctgcatacgtcttacgtcaagcgcgatcgtttctaaatttaaatttaaggtgtttaagagccactgcgagtaatcacagtggctctttttatgtcggcttcctctgacagagggaaaggaagtgatacagcgtactaatgaacttcacggtacctttcacttagaaaaaaactgtgtatataaaaagagcggcgcaaagccgctttttcagggaacccatgcaactgggttccctacaatttgaacgtcccccggacgttcaaatctaccttcctagttttgagttaggcaaaagtattccgaactctgcggagttcggcttagggctcagccctaagaatccgcgaccttttttgaaaaaaggtcgatcaaaaacttttaactcacgttttgcgtcatcactgtgctactgtttccaacagctcgcaaatatccatggctgcattttgattgataaccgctctctgccgtttgcgcatttcttctgcatttcccggctccgaaagcctttccactgccgataaaagctctgcttctgtgttttccacctttacggcgataccctccttggcaaaaaactccgcgttgcggctttcgcaccccggtatcggcgaaatgtgcacaagcggcacgcccgccgcggcgctctccgtagatgaaagtccgcccggcttcgagataaatacgtcgcttgcctttaaatacagtgccattttgttcgtgctgcgcattggcgtgatttgcccattttttgcaaattcagttttcacgctgtcaaacagcgcctcattgctgccgcacaaaatgttgaggtcgcagtttgcattttgctccaaatacggtagcagtgcccgcacggcatttataattgaccccgcgcccatgctcccgccggaaagcagcagcgtgcgcctgtctttcggcaagttaagcgcttcccgcgctctgtctttcgtgatggtatcatcggaaaaatccagccgcaccgggatgcccagcggccgcaatttttccgcaggaatgcctcgcccggtgaaatcgctgctcaaaagcggggagggcgtcacgtacaagtcgcagtccgattcctccgtaaacggaacgcaagtgtagtccgtcgcaataaacacaaacggcggcgtttccatgccgtttagccgcatgtgtgtcaaaatctccgccgggtacaaatgcgtgcagacgatcacgtccgttaggtgttccgcaaggtatttctgcatgtacggcgccattttgccgttgatgtggtacaccggcgaacgtcccggcagcttacggtacgcgttaccgaggtcatagaccgcgccaaacagcttcgggcttttctgtaccaactttatataggtctgcccgactttatttgcaagctcctcgctcaccagcgtgtacgggtccatgcgcacggcgtggtgcccgcgttccgtcagcgcctcaaaaaccgcttgtgctgccgtgttgtgcccgccgcccgtgctgcaggatagaatcagtgcttccatgcaagtttcacctcaaagtgttctttttcctcggcactcataaagagcttcgcgagcaccgaagccgcaatcagcaaaaagccgaagacgatatagcggtttggctccagccaaaccgtgcagatggccgccagaatatacgtcgccactgtgcggtaatagttcgggttgattttaacaacgcacgaaaagaaaatgaagatgcccgccaaaacgcacagagggatccagtgcggcagcagccccaaaaagcacccaaacgttgccgcaatgcctttgccgccgtgcttaatgtcataaaacggcagaatatggcccaagaccggcgccgccatcacaaaagagagcatcagcgggttttcgggcagttctccgctgcggtacaaaaagaccggaaaaaagccctttaacaggtcgccgcacaacgtaaacacgccgcaccggaacccgccgtatgtaaacgcattcattgtgcccgggttcttgtccgggctttccgccataatgtctgtctttttgaagatcagcccaccgagccgcgcaaacaaaatactgcctagcagatacccgaaaataatatataaagcgtcgcgcatttccatgtttttcacacactccccaaaaattttgcgccacaaaaaattcacaattttgccgagagtctcgtcttgacaactacttataaagttattataatatgaaccattgacacttgtcaatttgacatttgtccaagttaagtgaaaatattgacgaaacaggagggaatgtctatgtatcagggaaaaaatccaacggcgctgcaatcgcagaacctcatcacagaggcacttttagcacttatggaggaagagccgtttcaaaaaatcacgataaaagccgtttgtgcccacgccggcgtttcacgccagacgttttactcgctgtttgaaaataaggaagaggtcattgggcgtcggctcgaccagctttttgaagaataccgtaaacggttcattgaggaaaagcgcgcttacaccattcgcagtctatgtgattctattatggagtgttttgtggagcagaaaaaactcctcagtcttctggtcgaaaatcatctggatacattggctcgcgaaaaatcggaagcgtatctcctgcatttggacaatattttccacgcttatgaccacgaagaccgtgattacgccatttcatttcttgccggcgcgatcatcagcatggtggtttacgctattcgcaaggatgattttacggatagccgcaaaatttcgaatcttgtgcaaaagatcattaccggccaatattttacaatttaactccgagaattcctataacaaaaaccgctcgggctttacggcttcgagcggttttatattacaagaaggattatttgtggtagagattattgtcctcatacgttgcttcgcacgtcacgttgacgccaaggcgtttgaatacgctgtcgtctaccgagccgaggattacgctggagtgcaaatcacagccgctcagctcgtccagcttctgcatggcgcgcatcgcgttttcgtcggtcgccgcgctgatggcgagcgctaccaacatctcatcggtgtgcaagcgcgggtttcggctctgcatgtagtcggttttcagcgtctgaataggcgcaatgaccgtcggcgagatgagcttcacctcgtgcggaatgcctgcaagcatcttcaaagcgttcagtgtcaacgcagaggaagcacccagcaattccgatgtgcgccccgtcacaatcgtgccgtccggtagctctaaagccgccgcgggctgtcctgtcgcttccgcgcgcttcaatgctgcgagcacgaccgggcggttctccggctccaacttcagctggcgcatcaggttctcgattttctgtaattccgcttcggaagcaagaccttggcgcacaaggcacgccgtcttaaagtagcggcgaataatctcctgcttcgaggcttcgcggcacacttcatcgtcgatgatggacagacccgccatgttcacgcccatgtccgtcgggctcgcgtacgggcactcgccgtaaatctgctcaaacatcgcgcgcagcacggggtagatttcaatgtcgcggttgtagtttacagttgtctcaccgtatgcctcaaggtggaacggatcgatcatgttcatatcattcagatcagccgtcgccgcttcataggcaaggttcaccggatgctttaagggaaggttccaaatggggaaggtctcaaacttcgcgtagcccgccttaatgccgcgcttgtgctcgtggtaaagctgcgaaagacaggttgccattttgccgctgcccgggcccggagccgtcaccacaacaagggagcgcgtcgtctcaatgtagtcgttgcggccgtagccctcgtcgcttacgatgagcttcacgtcggaggggtaccccggaatgcggtactggcggtagaccttcagccccagtgtcttcatgcgctgctcaaaaatcgccgcggagggctggtctgcgtactgcgtcagcgtgatgctgcccacatataagccgaagccgcggaaaatatcaatcaaacggatgacatccgtgtcatacgtaatgccaaggtcgctgcggcgtttgtttttctcaatgtcgttcgcgttgatcgcaatgacaatctccgcctggtctttcagcgctaaaagcatcttgattttgttgtctggttcaaagcccggcagcacgcgtgaagcgtggaaatcgtcaaacagcttgccgccgaattccagatacagcttgccgccgaactggtcaatgcgctcgcgaatacgcgcagactgcagctcgatatacttctgactgtcaaaaccgattttcttcatggtcattccccttccttaattcatacgtctcatgcgtcctaaaataagcccctttaaggtgcatttgaaaagtcgtaaacttgttttccgatacaccccgaatacagtaaaaaagcgggcgttcggtatctgcccgcgaaaaatctgtttttagtatagcaaaaaacgcgttttttttcaatagcaaatcttggtttgcgccgcctaatttcgactctcttccgcgcgagatattgtcagtatcttcaaaaagtggtatactgtttattaaatcgaagtttaattttaacggcggtacagggagacacttttcatgagcgagcagaagcgaaacacaacgaaaaaccaaatatgccttgggcttttggcgcatgtcgatgccggcaagaccacactttcggaagcgatgctgtatgaaggcgggcagctccgccgtctcgggcgcgtcgatcatcaggacgcgtttctcgataccgacgtgcaggagcgcgagcgcggcatcaccattttctcaaagcaggccgttttaccgctcgaacataccgcgtttacgctgctcgatacccccggtcacgtcgatttttccagcgaaatggagcgcacgcttcaggtgctcgattacgctgtgctcgtcatcagcggcacagacggtgtgcagagccacacgcgtacgctgtggcggcttttggagcgctataacgtccccacgttcctcttcatcaacaaaatggatctcgacggcgcagaccacgataaagtcttagccgagctgcaaaagctcagcaccggttgcgtcgatttcacatctcccaaagcggaacgcgatgaaaacatcgccgtttgtgacgaagacacgctcgcccattatctcgaaacgggcgaagtcgaatgtcccaagattaaacgcctcatcaaaaatcgcaagctttttccgtgctggttcggctcggctttgaagttagacggtgtaaaagaacttctaaacggtcttgaaatgtacaccgaaatgcccgaataccctaaggctttcggcgcgaaggtcttcaaaatcgcacacgataatcagggcgcacggcttacgtatttgaagatcacaggcggcactttgcctgttaaaatggtgcttaaaggcggcgcgggcgaaaacgtatgggcagaaaaagccgaccagctccgcatctattccggtgggaaattccgccttgtggaggaagtcaccgcgggcggcgtgtgcaccgtaacgggcctcacgcacacgtatcccgggcagggactcggtgcggaggaagacacccccgcgcccgtgcttgaaagctttttgacgtatcaggtctttttgccggacggcatggagccgcacaccgccgtgcgctgtttgcgtgttttggaggaagaagacccccagcttcatgtcgtgtggaacgagcaattacacgaaattcacgtgcagattatgggcgcggtgcagcttgaagttttgcagcgcgtcttaaaagagcgctttaaaatggaggtcacgttcggcaccggcagcattgtctaccgcgagacgatcgaagaacccgtcgaaggcatggggcattttgagcccctgcgccattatgccgaggtgcacctgctcttagagcccggcgagcgcggcagcggtatgcgtttcggcaccgtgtgcagcatggatgtgcttgaccgcaactggcagaatctcattttaacgcaccttgaggagcgcagctaccccggcgtgctgaccggctcgcccatcacggatatgaaaatcacgcttctcatcggccgtgcgcatttaaagcacaccgagggcggcgattttcgccaggccacctatcgcgccgtgcgccacggcttattgcaggcgaaaagcgtgcttttagagccgtggtacgatttccgattagaggttccgcagtcgcaggtcggccgcgccatttcggacatgcagcgcctttgcgcggagttcgagccaccgcagaccgagggggaaaacgccgtcatcacgggctttgcgcccgtctccgaaatgcagggttacaccttggaggtcgcatcgtacacacgcgggcttggcagccttatttgtatgccgaagggctacttgccgtgccataatgccgaagaggtcatcgagcatatcggctacgatgccgagcgtgatttggagaacaccggcgattccgtcttctgttcgcacggctccggcttcgttgtgccgtggcgcgaggcggcttcccacatgcacctcgaaagtggatggaagcccgaaaagccgggaacaaaatctgccgaaaccgaagctcccgtgcgcgccgccgcacagctgccgcctgtgttcgacgatgagctgcgcgccatttttgagcgcacctacggccctatccgacgccgcgatatgcagccgcaaaacgccgtccgcgccgcagaaagcagcggtaagggggagtggaaggtgccggaaaaggtcttcgagcctgagtatctcctcatcgacggttacaatattctctttgcgtgggacgatttaaataaggtcgccgaaaaggacatcgacaccgctcgacagattttaatggataaaatctgcaattatcagagcttcagccgcagcacgtgcatcctcgttttcgatgcctatcgcgtcccgcgtgacgtggaggacgttatccgctaccacaacatttccgttgtgttcacaaagcaggcggaaacggcagatacctacattgagcgcgccacgtttgagatcagcaaaaagcaccgtgtgcgcgtcgccacatccgacggcgcagagcagatgatcgtactcggtcacggcgcgcgtcgtgttacggcctccgaattcaaggtggaggtcgatgaagcgaacaagcgtatgcgcgaggtcatcgccgattggaacgaaaaagaaagcgcccgccacgcgcataagcctttcaaaaatttaacggatcaaacgcagagtaatctgcgtgcgtatacagaaaacaacaaaacacaaagaaaggaaaatggaaaatgaaagtcttactcttaaacggaagcccgaaggcgaacggcaatactgccgttgctctgcatgaaatggtggatattttcaacaaagaaggcattgaaacggaagttattcatgtcggcaataaagacatccgaggatgtgtggcatgcgggcaatgttctaagctggggcactgcgtttttaacgatcttgtcaacgaagttgcgacgaaatttgcggaagcggacggtcttgtcgtcggtagtccggtgtattatgcctccgcaaacgcgacacttgttgcgcttttgacgcgcctgttttacagcactccattcgataaaacgatgaaagtcggcgccgccgttgtggctgcccgccgcggcggcctttccgccacgtttgacgaactcaacaaattctttacgatctccggcatgcccgtcgcgtccagtcagtattggaacagcattcacggcggagcaccaggcgaggcgaaagaggatttggagggtctacaaaccatgcgcaccttggcgagaaatatgacttttttgatgaagagcattgcgctcggtaaggaaaaattcggcctgccggaaacggaacagcgcatcggaatgaactttattcggtaaaaaatactgctaaagcagcaaagaagcacagttaagcgacaaagagcatctttgttgatttttcaatatcttctattaaaaatataaatttatccgcaaaatggcaaaaatctcccatggcaaaaagccaagggagattttgtttatagatcaacttttaatatattcgggtttatttccagtcgcctgttccggcttcgacgtagcgggacttctcaaatacggagatcatcaaggtcggatcggtcgtgccgagatcggaatatgtaagccccagcgccgtgccgctgcttttatcctgccactcgagatattgagtgccgataccgttgtcgtcttgaacggcaggtgcgccgaaggtttcggtgaagcgtttgcttgcggcttcaaaatgcttttctgccgtgccgcgcgcaagctgttcgtggaacgtcaccgaaaacagcttgccgttttcgtcaaactgcgcatcaaatttgccggagcagtctgcggactgcacgatgtcctccgatgaataattcgtatatgcgaaaggcgctgtcgcggggctttcgctgaccattgtcagcttagagccgatagcggattcaagctccgttgtgtcgatgccgaacggcgcagtggaatacgcatagccggtcttggaatcgaatcggaaagcgtctgtctctttcacggttgtcttagacgaacagccgacaaacgtgagcatcaaaacaagggacaaaaccaatgcgagctttttcataaaacgacctcctctgaattagtgttatgaatttgatttaaagttttactaaaagatatcacctctgagtgtagtttttggtagtatgttacacctgcatgatatcatgtataacagggtttgtcaatatatttaaaaattgttagaaaaaaaatagaacaaaaaatctccctctgtgccgaaacacaaagggagactgtttataatgctttgattttagagcaagatcgaattagagaatgatgctcttgccggtcatttcttccggctgcggcagatccatgatcttcaacatggtgggtgcgatgtccgcgagaacgccgccctcacgcagcttgcacggataaccgacaacgcagaacggaaccgggtttgtggtgtgtgcggtaaacggttcaccgtcatcatcgaccatcttgtctgcattgccgtggtcggcggtgatgagcagcacgccgcccatctcgtcgatggctgctgcgaccttgccgacgcaggtatcgacagcctcaacggcagcctttgcagcctcgaacacgccggtgtggccgaccatgtcgcagtttgcaaagttcagaatgatcatatcgtacttgccggacttgacagcctcaaccatcttatccgtgacttcgtaagcgctcatttccggctggaggtcatacgttgcgaccttcggggatttgacaaggatgcgatcctcacccggatactgcttctcgacgccgccgttgaagaagaatgtgacatgcgcatacttctcggtttcggcaatgcggagttgcttgaggcccttatcggagacgtactcgccgagggtgtttttaaggctctgcggcttgaatgcgatctcaacgttcggcatcgtggcgtcatactgcgtcatgcagacgtaggtgagcgggaagaagccattcttgcgggtgaagccggtgaaatccgggtctacaaacgtgcgggtgatctctcttgcgcggtccgggcggaagttgaagaacacgacggaatcgccggatgcgaccggagcgccgcccttgatgacgcacggcacgacgaactcgtccgtgacttcgttttcataggatttcgatacagcgcaaaccgggcacgcgaactcttcgccttcgcggcaaaccatggcgttgtaagccttttctacgcgctcccaacggttgtcgcggtccatcgcatagtagcggcccatgaccgttgcaaccttgccgacgccgatttccttcatcttctccatgagctccttgacgaagtccttgccggaggaaggcggaacatcgcggccatcgagcagggcgtgaacatagacgttttcaacgcccatcttttttgccatttccagcagaccgtagaggtgctggttgtggctgtgcacgccgccgttggaaagcaggccgatgaggtgcagcgcggtgccgttttcttttgcgttattcatggcgtgtacgagcgcttcgttctcaaagaaagaaccgtcctgtaccgccttcgtgatgcgggtaagctcctgataaacgatgcggcctgcgccgatattggtgtggccgacttcgctgttgcccatctggccgtccggcagaccgacgtccatgccggaagcgccgatctttgtaatcgggttttcagagaacagcttatcgaggttcggtctcttagcggcggcaatcgcgttgccctccgttttagcaattccgaaaccgtccagaatcatgagtacaacaggtcttttcatagtggagatgcctttcctttcaactggaaaaaatctttcggtggaaaaatcagcccttggtggctgcgtctacgatggctgcgaagtcgttcggcttcagggaagcgccgccgatgaggccgccgtcaacgtccggctgtgcaagaagctcagctgcgttgcctgcgttcatggagccgccgtactgaacggtgatgccttctgcagctttttcgccgtagagggacttgacggtcgcacggatgacagcgcaaacttcgtttgcctgctctgccgtggcggtcttaccggtgccgatagcccaaaccggctcgtaagcgatgatgatgcgcttaagctcttcttcggttacgccgccgagtgcgatctttgtctgcatggcaacgagctcatcggtgatgccctgctcgcgctgctcgaggtactcgcctacgcaaacgatgacggtgaggcctgcgtcaagcgcagctcttgttctcttctgaaccgtaacgtcggtatcgccgaagtaggttcttctctcgctgtggccggtgatgacgtactcaacaccgcaagccttcagcatttctgcggaaatctcgccggtgaaagcgccgctgactgcccagtggcagttctctgcgccgatcttgatgttggtgcccttagccgcctcaatagcggttgcgatgtctacatacggcacgcaagcgacaacgtcgcagcctgcgtccttaacgagcggagcaatggcggtgatgagttcctttgcctccgcaggggttttgttcattttccagttgccggcgataacagcctttctaacagccttgttcatgattttctattcctttccgtcggttaaaaaccgtttttattgagacaacaatacgggagcagagacaagctccgctcccgttcatgcttttaattatttctcgttgaggcaagcaatgccggggagctcaagaccctcgaggaattcgagagaagcgccgccgcccgtggagatgtgcgtcatcttatccgcgaagccgagcttctcaacagccgcagcggagtcgccgccgccgataatggagattgcgttgctgtctgcaactgcctttgcaaccgcgatggtgccgtttgcgaagttttcccactcggaaacgcccatcgggccgttccaaacaacggtgcctgcgttcttcacggcgtttgcgaacagctcacggctcttcgggccgatatcgagacccatccaaccttccggaatgtcgtcggaatcgacgatcttccactcggagtctgcactgtactcggttgcaacaacgttatcgaccgggatgaggaagttgatgcccttagccttcgccttggccatcatttccttagcgagctcaaccttgtcgtcctcgcagatggaggtgccaatctcgtggccgagagccttgaagaaggtgtaagccatgcctccgccgatgatgagtgtgtcgaccttttcaatcaggttgttgatgacgccgatcttatcggaaaccttagcgccgccgaggattgcaacgaacggacgcttcgggttctcgagcgcgccgcccatgatggaaatctccttctggatgaggtagccgcagacagccgggaggtaatctgcaacgcctgctgtggaagcatgtgcacggtgtgcggtgccgaatgcatcgttgacatagatctcagccatggaagcgagtgccttagcaaaatccgggtcgttcttggtctcttctgcgtggaagcgaacgttctcgagcatgaggacttcgccgtccttcagagctgcagccttagccttagcgtccgggccgacaacatcttttgccatgatgacttccttgccgaggagcttggaaagctctgctgcgacaggtgccagggagaacttcttcacgtcgcccttagcagcttcgagtgccttagcggtcgcttcggcctgctctgcctccggcatagcgtcgatcttcttcttctccttcttgtcgagctttacaacgtcgttgaagatgttgtgcgggcgacccatgtgggagcagaggatgacctttgcgttgtggtctacgagatacttaacggtgggcagcgcaccgacgatgcgctttgtgtccgtgatgacaccgtccttcatcgggacgttgaaatcgcagcggacaagaacgtgcttaccggcaacgtcgatgtcttctacggttttcttgttgaggtagttcattttcgtacactcctttaagaaatatattgagttacggttatacgtttggttggcggacaacaccgcctacggaatttattttataccaaacggaagatgatttcaagagataacgcgcaaattgcacactttttagcgcaaatttttcatttttgcgattttgtacgggtttttatttcgcaccgttcgcgtctgccgcgtcccagtcgtagccgcgcaggcgaccggcttcggaaagcgcggggaaatcccactggcgcaggacttcgtaaacgccgatggcgatgctgttggagaggtttaagctgcgcgcttccgaaatcatggggatgcgcacgcagcggtctttgtttttgaaaagcagatcttccggcagtccggctgtctctttgccgaagaagaggtagcaattatcgggatagtgtatatccgtgtgcttatggacggattttgtggagaaaaagaaaaattcgccgctgttttttgcaaaaaattcgtcgagcgagtcataataggtgatgtcgagcaaatgccagtaatcgagaccggcgcgctttagctttttgtcgtcgattttaaagcccatggggcccacaaggtgcagccttgcgcccgtggcggcgcaggtgcgcgcgacgttgccggcattttgagggatctccggctcgaccataacgatattcaaaatcattgctgtcaaagtcctttcgggaagaatgatgtatgtttttgtaaaaagggggaaactaaacgtgacggctgttttgtatgttttaaaagccgcaatctggatctggaggtttgatgccatgtataagcagagcatgaacgttgtgaagggcgtgggtctcggcattgccgcaggcgctgccgtggctgccgtttcgtccgcgatgatgaacggagggaagaaatccgccaaggcgcgcacaaaagagatgcgccgcagcaccgccaaggccgtgcacacggtggggcagcttattgacggcgtagagaacatgttgaagtaactacccgcggtcgcagtggcagcctaaaacgccgctgtggccgaatacatagatgttgcatggcgtgcggcgctcgccggcggctgcggcgcatttgagcgtcagggagccggaaacgggctgctcgtagcaccgttgcagccggttgcagcacccgcccgcgatgtcgcgccagcggcatgccccggcgtttgtgcagtgcttgatgcactccatatcgatgtagcgctgggaaatttcgccgcccgcgtggtaatcaccgttggagatgagcaggtgcgcaacggcgagatcgccgataacgtttgaaaagtggctttctgtgccgtggtgcggcgctttgacgatatagtagccgtcaaacagcttcccggagatgcggcgcagcacttcatcggacacgtcgccggtcattagaatatcgaggttcgacgggccgcggcttcggcgattgtgaaagacgagggagaggtcgttctgcgtttcggtgtagacgttgcgcacgacggattgatttaaaatgtcctgaatatccggcgcggcgggggaatgggcgaggttgctgcgcatatcctccatgcgatctaagaggtcgcggagagaatcaagcaggatgcgccgtctgccgggcgtggcgcggtcggacggcgcgaaggccgtttgacactgcatgtagagcctaacgaacgcatccttcgtctccaaaaactccgtttcgcgcccggtgtgaaacggggaagagaggcagatattgaggttttcaacggcttccgtcaggatggcgtcgaacgggaagggctcgttacgcgcgggggagagcacctcgtaaaacgcgccgtcaaatgtgaagatgtcgccgccgccgagcgtgaaaatgcggtctgcgccgacagaatccttgagcgcgtcgaaaatacgcaggcaggtggtgttcacctgcgcgaagtcactttgcggaacggcgaaaaaatgcgcgaacacggcgaattccaaaacgggatttacgccgcgcttatcgcacgggagggcggggaggtatacgcggtcaaagtagccgggatcccttttgacttgctttaaaaagccgctcatatggtcgcggtggtagtgcgtgagcagaaactggcgctgggcggcgggcgcatagcggctgaaaatttcattaaaacggcggtcaatctcctcttcaccgcggcgggcgtagcggctgacggagccgcaatccaccattaaaatctgccggttttgcccgacgaggacggtgcagtcgccgtattccacgtcgtgcagttcaacgcggtccattacgctttgtcctcgttctgcacgtggcggtacaaaatgccgttttcatagcggtcatctttccactcgccggtgtagacgacattgccgtttttgtcgaacgccgtgccgtgaccctcccgtttaccgttctgccagccaccggaataaatcaagttgccgtctgcatcgaacagggtagcttgacccgttttttcgttgttttcatatttttcgacgaacacgcagtgcgtttcggggtcgacggagacacctgcgccctgcttttggccgtcgatgatttggccgttgtaaattaaatcgccgtttttattgaaaatcgttgccatgccttgcggcttaccgttttgccagtgggaaatgtgcagcgcgtggtcgctttcgcggaacgaaacgccgaagccttcgcgctgatcgtctttgaagttgccgatgtaggagacggcgccgctgcggtagtggtgcacgccgaacccctcgcgcaggtcgtttttgtactcgccttcatagagcgtgatgccgttgttgttcacggtgcggccgaagccctcgcgtttgccgtcttcggaaaggtcgcctgtgtaacggagcggcgcgccgcctctgatgagcgtgatgccgttttctgggtcgtcctctttttcagtttcctttgcaggcaggagcctatcaagcagagcacgtgcctgccggagttcttccggcgtgatgtcggggacggagtctgtttttggcgtttctacgggagcaggttcttccgggacttcttcgggttcttctgcgggagtgtcctcaatgggggcttcttcgacttctttcgtctcgggttctgtttcgggctgcggctcggcttcgggtgcttcggaagcagcttcttcggaagcgggttcctcttcggtaggctctgcggctttttcggcggggtcgctcaggaaatcgacaagtgcgggctcggtgaggttcccgaaaacgggcagttcagactccggctcggtcgtttcgggcacatctccgtctttgacctcccaacccatggagagcatgacggaggcgtttttattctgcttcagaaatttgatgcggcgctgctgctcttcacgcgggcagtaggcgtattcgccgcgctcatcggcgacgagcagaaggcggtcgccgaactgggcgttttgcaaactctgctcggcggtttggaatgcatacggcacggggaacagcacggtttctttcgttttgccggtggaatcgttataatcgaagcggatgacggcgtcgcggtggtcgtccggcttaaaggtaatgcgcgcgcggcggtcgtcattgggagagaaatactccgtgcgcatccactgcatttcaccgtcgtagtacacgcgggcgcgcaatgcgccgtaggcattgtaaaacgcgatgccgcgctgaccgccgtttgtgaatgcggcttcgagcgtggttttgcctgcgcgttttttccattttatagtgcggcgggagagcttgccgtgcacctcgccggaaagcccgtcgaaaatgccgcgggcgcggatatgtacggttttgccggatccgaaatagctgcggcgcgcttcataaagggcatcgtgaaacgaagacagcgtatcgagcccggtgtagcacacggtgtagaccttacggttcacaaggcttgcgctgagagaagtggcgttatgttccgtcatctgaacgacctttctgcgggaaacgtgcctgtttcccgtcttttccgttgatatagtttcagtataccacgaaaggacgtttatttcaatcacacggttccttcggattttaacttgcgaaatgcgttaaaatctgctataatattgtatcatcgttctatactataatagaggaaaggatcgcgcggcatgaaaagtgtgaagaaagaagtctcgttcaggcgaaaactgatgacggctgtattgagcgtcacgctgccgctgatcgcgctgcttttgttcagcaacctgtattccacgcgggcatttaacaggaaaattgcggattccaacatgcgcacgatggattaccgggcggggcgcatggaggagcagctcgactctgtgaacgattttctcaccggattgacggtgagcgacgattaccgcacgctgtcgggcggtgagaaaaaccccttaaaggcgtatcttgcaagctatacgctcattacgcagttgaaaacggcgctgccggcatacggtgatgtgggcgcgtttttcatttacagtgcgccaagcgatgccgagcgcgatatttttgacgattctatctcctacgcgcagaaggagcggctgcgcgcttttgtgcgcgacgcggtggagaacaacacgtattcgtacaatatgcagtggcggcacgcggagatcggcggcaaggcgtatttattccgcttttacggcgggcgcggcacgtatcttgtggcgatggtgccgttggcggcgctggcggacgcgcgctacatgcagattgataccgacgcggtgatgttgttttccgacaaaaacaacgagccgctgacctctgtcgattttgtggagggaaacgggatcgatctgaacggcgactatgagaactactttatttcgggcggaaagcagcggtatatgatcgtgggccgcgatttggcgggtacggattgcagggcgatccttgccgtaaacgaaagcgggtatttcggctcgctcgatggcttgcaggcggcgctgctggtactctctttactggcgctggtgctgattccggtcattcagtggcggctgacgaactccatctcgaagccggtggaggggctgcgcagtgttatggagcatatccgcgccggcaatctggaagcgaaggccgagggcaagacgaacatacgcgaattcaacgaggtgaacgagacgttcaacacgatgatgacgcagattaaagacctcaagatcgaatcatacgagcacgagattgagacgcagaaggcggaactgcgttacatgcagctgcagatccgcccgcatttcttcttaaattgcctcaaaagcttatatgcgttggcggaagcgggcaaatatgaccgcattcaaaaaatgattttggagatctcgaagcacatacggtatatttttacggacagtatggagcttgtgccgctttcgcgcgaattagaccacattgaaaattacatcgagatgcagcgggggtcttcgcagtacccgccggtgtgccggtttgacattgacccgcgtttacgggacttgccgatcccgccgctttctttgcagagctttgtggaaaactgcgtgaagcatgtgtactcgccggattacgttttgaaaattgaggtgaaggcagcggtgctgcgcagcggcacggacgcgtttgccgacctgacggtgacggataacggcggcggcttccccgaggacgtgattgcggagatcaacgagccggacagcccgctatacgcgcagaaccacgtgggcatcaacaatgtgaaaaagcgcttgcagctgatttacggtgatcgcgctttatatgcgttctttaatcgggatatgggcgaacgcatgggcagtgtatctgaaattttgattccgatagacctcgcgatgctgcatgcgacggaggacgagccggacggagaggaggctttcaacggatgaacgtattgatcgtagatgaccagccggaagttgtggagagcatggtgaccggcgtaaactgggaaaaaatacccgtggagcaggtgtttacggcgtacagcgtgaaggaagcgcaaagcgtttttgaacgcgagcgcatagatgtgctgctgtgcgacattgaaatgccgccgacgaacggctttgctttgctgcgttgggcgcaggagcggttttccggcttggtgtgtattttcctttctgcgcacgcggaatttgaatatgcgcaggaggccgtgaagcttggcagctttgactacattttgcagcctgcgccgtatgcggagattgaggcggcggtggagcgcgcggccggaaaagtgcgcgaagcggaaaaccaaaggcggtacaatgcctatgcgaagtaccgtggcgaggacgaaagtgcggagaaggaaccggacaagacggagcagacaccgatacagcgcgcgatgacgtatatccggagaaacatcgacaaggatttaagccgcgcggagattgcggacgcaatctatttgaacccggaatacctttcccgcttatttaaaaaggaaacgggcgcctctttaaatgattatattgtgacggagaagatgcgcgcggcacagtctttgctgagtgacacaaacatcccggtgagcctcattgcgacgaaggtggggtactcgaatttctcgtatttttcgcaggtttttaagaaatacacgggcatgtcgccggtggaataccgtgcggcaaagcggcggtctaagctgtaaagcacgttttctttcggtaaactgttgtaaaactgtcacaaaatgtaaaatccgtgtaaacgggtgaaagacagaaaatacatcttgcaattgagagagggacacccatatgggttttcctctttttttatcgatatagagtatcgatatgcaggattgtaaaaaacatcctgcaaagtcttcacgaacatgtcacattttgaataggagatgtcacgaaatttgcagaaaagatgcggattttctgttactatatatgtgtaatttgaccgcgaaggctaaaaataaatctatcgcgggtcgaaaagtatgaaaggaagtaagaaaatggcaaagagacttgtagcaatgctcatggcagcagcgctgaccctctccctggcagcttgcggcaacggcggttcttccagctccaccgcagactccagcacatcttccgaatcttccgcttctgacagcgctgcagctgatagcagcgatgcctcttccgaagcagaagatctgaaagaatccgaactcgtaacgctcaatatcgtgacgatgtcatccggtaaagaagaatccggtatcgcacaggttgaggaagcaatggacaagatcctcgaagagaagttcaacgtgaacgttaagctttccttcctcccgtacagcagctatgctgaccagatctccctgatgctttcctccggcgaaggcgttgaccttctcccggtttacatggtcaactacacggcttgcgctgattccggtcagctctatccgatggatgatctcatcgagaagtacggccagggcatcattgagcagctcggttgggacaacatcaactgcggtcgcgtaggcggcgagctgttcggcctcacggagggccgtgaccttgcagcttcccagggttttgagtacagactggaccttgctgagaagtacaacctcgacatggattccgttaagaccctcgaagacctccacgatgttctcgttaccattaaggaaaacgaagagaactgctggccggtagctgtttccgccggcgaaaacatccgtaactggggttgggactctctgggcgacgagatggttaacctcggtgttctctccgacatggctacggacaccaccgttgtgaacctctacgagaccgagcagtacaagaacctcgttaccacgatgtacaactggatgcaggaaggcctcattcaggctgacgctgtgaacaccaccgagactgcaaccactctgcaggacgcaggcactgcattcggcagcttcgttaacctgaagccgtactatgcagaagagaacaacgcgaacctccagaatccgatcggcacggttgagctgattccggcactggcttccaccgaccgtgttaccatggctctgtggtccatcgcaggcagctgcgagcatccggaagctgctatgaagactctgaacgagctttacagcaacccggagctgagcaacctctacatgtacggtattgagggcgttcactacgaagtaatcgaggaaggcgctgtcacgaacggtcaggacagaatcaactatccggacggcgttgatgcaacgaccaccacttacagaaagtccggtacttggctgatgccgaaccagttcatcggcgacatctggggcaccgatctcccggctgattactgggatgcaacgaagaccttcaacgaagagtctcagaagtccgcagcattcggcttctccttcgacgcaacgcaggttgcgaacgagatcaccgcttgcacgaacgttgttaacaagtaccacaaggcactcgtttgcggcgctcttgacccggagacgactctcccgcagttcaactctgagctgaaggatgccggcatcgatgcgatcatcgaagagaagcaggcacagctcgacgcttggctggctgagcagaagtaatttacttcacaattagacttaaagaagctggagcgagattcgtttcagcttccttgtgaaaatccgtgtctttttcccgaaagggaaaagggcatgggcgtgtacagagagatgacccttctgtacatgcccatgttcttttggaaaatttcaacggagcaggacgaaaacagattgaaaggggtttctaattatgccgaataaatctgccgcactggaaaaagaaatgaaagtgcgctcggcaaaaccgaataagtggctgcgcttttaccgctgcatcccgctgtatctgatgttccttccgggcgccctgtatctgctcatggataagtatatcccgatgagcggtctgatcatcgccttcaagaaggtcaactggcgtaagggcatccttgcaagtgactgggtgggtttcagcaacttcacctacctttttaaaacgaaggacgctttcaacattacgcgcaacacactgctttataacctgtgctttatcgtgctgggcaccgtgattgccattacaatcgcgattctcttaaacgagattacgagcaagctcttcaagcaggtgtaccagaccatcatcctgatgccgtacctgatctccatcgttgtggtcagctatctggtgttcgcaatgctgagctctgaatccggctttatcaacaacacgatctttaaggcacttggcattaatccgatttcctggtatacagagccgaagtactggccgttcattttggtcatcgtacatatttggaaggtgttcggctacgactgcattctctattatgcaacgctcgtcggcattgaccacggctactatgaggcggcggtcatcgacggcgcaaaccgctggcagcagatcgttcacgttacgctgccgagccttctgcccaccatcatcacgctgacactgatgtctatcggcaagattttctattccgatttcggtctgttctatcaggtgccgatggattccggcccgctgctcgacattacgagcacgattgatacatacgtttaccgcgcactcatcacgctgaacgattacggcagatcttccgcagcaggcgtttaccagagcgttgtcggctttatactggtcctgtgcgcgaaccttgccgttaagaaaatcggcggcgaagagaacgcactgttctaaggaagggagagagaaacaccatggtcgaaaaaaacaaagggtttcaggtcggcgcacacattgtgatgatcatcctttccctgtgctgcatcttcccgttccttctgctcatcgtgtcctccattacggacgagcaggaattgatccgcaacggctacacgctgttcccgaaggcactcagtctgaatgcttaccagtacatgtttaagagcagcaacaagattatctccgcgtacggcatcacaatcctctccacagttgtgggtacggtgtgcggtctttccatgacaatcctcatggcttacccgctttcccgccgcgacctgccgggccgcaacggtcttgcgttctacgtgttcttcacgatgctgttctccggcggtcttgtgccgacgtacatcatgtacacccgttacatcaaggtgagcaacacgatttgggcgctcatcattccgtccctcgtggtcaacgcgttctacgtgatcatgatgcgcacgtacttctccacgaacatcccggaagctgttattgaagcggcgcgcattgacggtgcgggcgagttcagaatcctgctgacgatcgttctgccgatgagcgttccgatggttgcaacgatgacactgcttatcggtctttcctactggaacgattggaaaaacggtctctactatctccagcagaacaagagcctttacagtatacaagttcttttgaatgacatgctacgagacgtgcaggcgctgaagagcggtatggatgctgcggctgcggctgagattacggcgaacatgccgagcacgggcatcaagatggcaatcgccgttgtcggtgttctgccggtgctcatcgtttatccgttcttccagaagtatttcgttaagggcatcacgatcggcgctgttaagggctgatttgatcaatccgatattctctttgccaacataataatagaatgacaaaaatcaccttcgcggttttcctccggcgagggtgattttgttatgtacgggtattttgttgcggtcgttgttttatgtgttttcttcgtttaagtcctgtaatctaaggccggcagtgccggtgacgggcagggaaaagacgatggctttcgctttggtctcaagcccggcttcctgcataatggcagtcatgacgttgtttttatccgcgtgctttacgacgatgagcacaagctctttttcactggcgagggaaacgccgaggaacttttccgcgccctccatgccggtgcccttcgcgtggatgacggtgccgccgcctgcgttttcgcggcgcgctgcggccataatctgctcggtatagccctggtttgcgatgacgaccagaagctcgtatttggtatctttcaagacgctttcctctcctttctgaaacggctgaccgttcgttaaaaactccagctgacgtttgccgccgatactgctgagcggcatggtgaacgcgatgccggtgccgggaatatcgatgagcatgatggtctgcagtcccttttgcacggcactccagaccttgccggtgacaacggaaagcagcacggctttttgcgtggcttcaagtccgaaatcgtttaggatttcagacgcggcggtgcctttgccgagcgtgctgagcacgacctcgatcccataggttttataaaatgacagaaatttctggctttggttgcggtctgtaatggtaatcatccagtataaattgtcgcccataaacgccctcctttacagttcgatgatcgcgttttcgtccatatcggcgaatgcggcgggtgcggcggtctccgttttatggcgctgcatgagctttgccgcgaggcccatgatctgaatggtgatgagcggcgtcatggcgaccatggcgacgacaccgaaggcatctgtgaccatgttgccgccgacggccgtgcacgcgccctgtgcgagggggagcagaaatgccgcggtcatggggccggaagcgacgccgccggagtcaaacgcgatggcggtgtagatcttcgggacaaaaaacgagatgatgagcgcgagcgcgtagcccgggatgaggaaccacaaaatcgaaatgccggtgaggacgcggatcatggcgagcccgagcgagatggacacgccgacggaaagcccgatgcccatggccttggcggagatggcgccgtctgtgatctcctcgacctgacgattgagaacgtacacggcgggctctgcgcgaacaatgaaatagcccatgaccatagcgacgggaatgacgacagcggaatatttataggaagctaactgctgcccgaggtaatgaccggcgggcatgaaaccgacatttgcaccggtaagaaacagcacaaggccgatgtatgtataaacgaggcccatgccaatctggaataatttgcgcttagaaagccgcagaacaagaaactgcgccgcgaggaaaaagagaatgatcggcaggagagagacggcaatctcgatgaggtaggtcgggataccggtgcggaacagctcgaaaagctccgaggaatcctgcatttcgggcaggatgggcggcgtgtaggtgctttcattcggattatagatgatgccgaggatcatgacggccaaaatggggccgatggacgagagcgcaacgaggccgaagctgtcgtctgccgcatggcggtcgctgcggatggccgagatgccgacgccgagcgccatgatgaacggcacggtcatggggccggtcgtcacgccgccggaatcgaacgcgacggcgagaaattccggcgggacaaagaacgccagaagaaacacgacggcgtagcatccgacaagcagcggcggcagcgcaatagaaaacagcatgcgcagaagcgacacgacgagaaacacgccgacaccgcatgcgacggatagaatgagaattaaattcggcacggacggcacctgcgatgcgagcacctgtaagtccggctccgagaccgtgatgataaagccgagcaaaaacgaaagcgtgataacgacaccgagctttttcgtttttgtcatggcggtaccgatgcgctcgcccatgggggtcatggcggtctctgcgccggtggtgaagaacatcatgccgaccaaaatgagcactgcgcccattaaaaagcacagcagaacgcttggcgagagcggcgcgatggtgaacgagagcgccagcacgatggtgatgatgggaaggacggcctgaagcgcttccttccatttttcagagaggatttgtcttaacttcaatcgatgcctcacgacctttcttatgtgttgtggggtggttgaacgaaaatcacttttattatagcataaaaacgcgtgactttgacgattgaaattgtgaatttttcaaaaattgtatcaacctaaaccaaaacggaaatagagatgaaaacgaaaaggctgcccggcaaagtgcgggacagcctttttggatgaaattatagctttgaaaggagcgtttcgacgtggctttgtgagaacgagggtttgtcgcccatggggaacgggatatgaagcgtcttgtatttggcggcgcagatgtttttaaacggcagccactcgattttctccaaattggagaacgactccgcgagagctttgacggcgcggaggctctcaaccgtatcggaaagaccgggcgcgacgacgtggcgcacccagagaggaatatgcatcgattccgtaaggtgcatgaaatcgaccgtgtgctgcaaggagccgccgcagtgggctttgtactgcgcttccgtggggaacttgatgtcgcaaaggacgaggtctgtgtgcttgagaacctgcttggcacgggaaaggtcgccggcgccggcggtatcgagcgcggtgtggatgttgtgttcatgcaggcgccggaataattccgcgacgaactcgggctgcaaaagcggttcgccgcccgagacggtgacacctccattttcgccgaaataggggcggtaacggaggattgttttgcagagattctctgctgtgtagggcgtgccgccggttaagttccacgtttcggggttatggcagtaggcacagcgcagcgggcagccttgcagaaagacgacgtagcgcaggccgggaccgtctaccgcgcccatggactgtacggagctgacgcggccttccattagattgcctcgtggaatgtgcgggagatgacttcgcgctgctgctctttggagagacggtggaagttgaccgcgtagccggaaacgcggatggtgaggttggggtatttttccgggttatggtaggcatcgatgagcgtttcgcggttcatgacgttgacgttgaggtgatgcgcaccctgaatgaagtagcccgaaaggagctggatgaggtttgtgatgcggtcttcctccgttttgccgagggcttccgggatgatggagaacgtgttcgagatgccatcgcggcaataatcataagaaagctttgcgacggagttgagctctgcgagcgcaccggatttatcacggccgctcatggggtttgcgcccggggcgagcggctcgccgagtttgcggccatccggcgtgttgccggtctttttgccgtacataacgttggaggtgatggtcaaaatggacagcgtgtgctgtgcgccgcgatagagcgggtattcgcgcagggcatcatagaagcggcgcacctgctcgcaggcgatggaatcgacacgcgggtcgtcattgccaaagcacgggaactcaccctcggtctcgaagtcggtgacgaggccggtctcggggtcgcggatgcagcgcaccttggcatatttaatggcggaaagggagtctgccatgcagctcatgccggcgatgccgaacgccatcaaacggcggacgttcgtatcgtgcagcgccatctggctcttttcgtaggcgtatttgtcgtgcatgtagtggatggtgttcatggcatcgacgtaagtttttgcgagccaatcgcggtagaaatcgaggcggttgagaaggccgtcgaaatcgacgtattcgtccggccagacaggcatttcaggcgcgacgcgggtctttttcacttcgtccatgccgccattgatggcgagcaggacgagctttgcaaggtttgcgcgtgcaccgaagaactgcatatctttgccgacgcgcatggcggagacgcagcaggcaatggcgtaatcatcaccgaatgcggggcgcataacggtgtcgctctcgtactggatggcatcggtatcgcaggagaccttcgcgacgaagcgcttccagttttccggcaggtgctttgaccacagcacggtgaggttcggctccggggacgggtggaggttatagagcgtatggagcatgcggtaagagtttttggtgacgagcgtgcggccgtcctcgccggtgccgccgagggactcggtgatccacatggggtcgccgccgaaaagctcgttgtattcgggtgtgcgcaggtggcgcgccatgcggagctttaagacgaaatcgtccatgatctcctgtgcgccggattcatcgagtacgccttctttgaggtcacgttcaaaataaatgtcaaggaatgtggaggtgcggccgaggctcatggcggcaccgttctgctctttgatggcggcgagatatgcgaaatagagccactgcacagcctcgcgggcgttttctgccgggcgggtgatgtcgtaaccgtacatggcggccattttcaccatgtccttgagcgcggtgatctggtcggtgacttcttcggaaaggcgaatggtatcggccgtgaggggatttttgccgaggtcggctttatctttctgcttttggagaatcaaacggtttacgccgtagagcggaacgcggcggtaatcgccgatgatgcggccgcggccgtaggcatccggcaggccggtgatgatgccggcgtggcgtgcggcgcgcacgtcatccgtataagcagagaacacgccgtcgttgtgggtcttgtgatatttaaactcctcttcgattttatcggagaccttgtagccgtaggcttcgcaggcggagcgcaccatgcgcatgccgccgaacgggttacaagcgcgctttaacggctcatcggtctggaggccgacgatgatctcgttttccttatcaaggtagccggggccgaaagacgtggcggtgatgacggtttcggtatcgatgttcaaaacgccgccgttttgctgctcggcgcggcagagagcctcgtacttttcgagcattttttcggtgcgcgcggtcgggggctgcaaaaagctttcgtcgcccgtgtagggggtgtagtttttctggatgaagtcgcggacatcgatgcgatcctgccacttaccgcctttaaaatctctccaagcgttcatagtttcccattcctttccggcgttttgccgtgcaaatttccttgttttggaagctgctgacataaaaacagggcagtgctttcaaaacactgcccagacggtcggctcattttcatacttttgctccacgatgtccccatcttgtattccgtcagttacaaaagtactttaacttgtggtcttattgtacacgcaaaagtgcgaaatgtcaactgtgaattttacgttcgatgtactccacctctttgtcgagcatcacgggggtgagggaaacgccgaacaggtgctcgataaggccggtttttaatagctcctccggcgtgccgctttgcatgattcggccgtttttcatgagaagcaggcggtcacagaacttgaacgcgaggggaagctcgtgcaggacgatgccgacggctttgttttgcactttgagcgtagagaggagcgccatgagctcgaatttatggtgcgcatcaaggtaagtagtgggttcatcgagcaggacgacgtcggtgttttgcgctaaaagcatggcgaggaacacgcgctggcgctcgccgcccgaaagcatgggcaggcggcggtcggcaaaggccgacacaccggcagttttaagcgcgttttgaatgacggtgcggtctttattggacagcgtgcgcgaaaagccgaggtagggatagcgcccatgggagacgagcgttttggcggtgatatccggcacggccctttgctgcggcaggaacgagacgcgccgcgcgagcgctttgggggcaagggcagcaatgtcggtttccgcggtaccgccgcacagggtgatgctgccggaatccgctttaataaggcggcagagcgcacggagcagcgttgttttgccgcagccgtttgggccgaggatgccggtgacttcgccgcggcggagttcgcccgagacgccgcggagaatttcggcgtgatttaacgtgacgcaaaggtcagcgaattttaaggcggtggaaaggttttggttcattcgagttttcctccttttttgcgcacgatgaggaaaaggaagaacgggccgccgagcagcgacagtacgatgccgacgggaatctcatacggggaaaacagcgtgcggctgagggtatcgcacaataagacgaatgacgcgccgaagagggccgaaagcggcactaagatgcggtggcgcgcgccgatgaagtggcgcaggatgtgcggtacaatgagccccacgaagccgagaagccccgaaaagctgactgcgccgcctgcaagcaggctggccgtcatgagcaggagaaagcgtgttccttgcacacgcatgccgagcgactgcgcggtctcatcgccgagggagagaacgtccatttcgccggaaaacagcacggcaaggagcagaccaagcaggatggcaacccacgcgggggtgagatttttgtacgcgatgccggaaaacccgccgatgaaaaaggagctggaattatagatggtatccgggaaaaaggtctttatggcgttgctgccggcggtgaaaacactgcttaaggccacgcccgcgagggtgatcgttgtgcgggaagcaccgctttttgccgcgacggcataaatgagcagcgacgcgaaaagagcgccaaggaatgctgcaaacggcaaaaacgcagtggctgtggggaagacggcaagcaaaaacagcacggcaaagcccgccccggcgttgacaccgatgatgttcggtgcggcaagggcgttatttaagacattctgcaagagcacaccggagaccgcaagtgctgcgcccgagagcacggcggcaagggcgcgcggcaggcgcacgtagaacaggatgcgattgtcgggcgttaaactaccgttttgcagggcagagatagcttcgtgaatagaaatttgtgccgagccgacacagaggctcagcacaaaggagaaaacgagcagcaaaagcgctgtgggaaataaaattttcttacgcatcttcgttcaaaaggagctttgcaatgtatgcgtagctctcgtcccagcggtttaagggcttatagtggaaaaggtcttttggcagatagatgtagcggccgtttttcacggcggagagtttgctccacgcggggttattttcgatgttctccgccatataggtcttggcgtttttttcgctgcccatcgtcatgacaaggatgtagtccgggtcggcttcgatgacggattccaagctgaggtcttcgagcaggctttcgttatcgtctgcgatgttgtgcgcaccgagctcttttaaaatggcgcccgcaacggtatcttcgcctttggccttgacgccggtggaataagcgcgcaaaagcaggacggtgggagctttctgtccggagagcttttcggctgtctcctgctttatagattcaatgcgctttaaaacccgcgtgacgttttcgtcgtatttttcaccgtccgggtcgttgacggcgcagaaattcagcatgatctttgcataatccatgacgttatccatgtgaaaatagccatggggaatctgcatatcggtgagggcggcatcaagctccgcgtgggcgggcaggtcggcggataaaatcacgtaatccggggagagtgccgcgacgctctcaagattcggctccataacggtgccgacgagcgcggtgtcgtcatcgatttcgatgccgtgctcgtctacggcatcttcggtaataccggcgagcttaccgccggagagcagccagcactcggcaaacgagccgtaaagggagacgatgcacggatcatcgggaagctccgttttggagccgtaggaatccgtaatgaagcgctcggagtcggcggtcgtttcgggagcggcggaggagctttcaggggtggtttcgttttgcgccggggcggcgcagccggaaaggagcagcacggcggaaagcgcgagtgctgcgaggaacttgagtctcatagggtatcctttcggaattattttgcgaggatctcctcgcggcggttcagaagctcatcggagaagacgtcgtgctcgaatttttcgatgccaagacggtcaatcgctttgccgaggcgttctttgggcatggcgttttccttgaaccagagcatggtcttctcgagcagaggctcaatctccgcgcgggtgacgaagcggctgagcggcgtgcccatgcgcgtttgcttgccccacgtgccgccgacataaatgcggtaaacgaccgggctttcgtggcggacagccttaaacggacatttgccggtgcagacgccgcaggcgaggcacttttcatcgatatgtaatttgccgttttcgacgtgtgcagccttggagggacatgatttttctaccatgcagaccttgcagccgcggcaggtgtcttcgtcgaagatcggcacgcggtggccctcgatgccgaaatcgtttaaagaaggcttcatgcagctattcgggcagccgccgatgccaattttgaacttgtgcggcagtttgacatttgcccagccgacgtagtatttttcgtgcagctctttggcgagcgcctgtgtatcgtagttgccgtagacgcacgtggtgcccttacatgcggtgacagggcgtattttagcgccggtgccgccgaagtagaggccacgctcggcagcgtaatcgcaggcggcgtcaatctgctcgaaggggatgccgacgatctcggcggacaggcgggaggtgaacgtcaccttgccgctgccgaatttttcggcaatctcggagatggtgcgcaggtcggcagcggtgaagaccgcgccggcgcagacgaggcggccggagaagcactctgtgccgcgattgatgaggaagccgcggcccttgacggacacgatctgttcgggttttaacatgatgaacactccaatatccaagcaaaatattccctgtaattatagcctttttttggggtaatggcaagaaatgcgggtgatttttgcaaaagaaatgaaaaaaccgggcgaagtattggattttcctttgaactgtgttaaaatagctaataacaaatcatcttctgttccggcggcgttttgaatgcgcgccgaaaaaagaaaggcgaagtgagcttttatgaaacgaagcatccattataaaaacattttgaaaacggcggtcacggcggcactgtgcgctgtgataatccttggcaccgcggcgtgcggcaatggcagcgccaaggcggagccctccccttccccgagcgtggagcctaccgcaacgcccgtgccagtcgaaaaagtgaaggtggcgaccatcaacgacatcgacgattcattgaatgtgcgcagcgaggcttcgacggattccgaaattctcggcacggcagaggccggcgaggtgttcgaggttgtggcacaggacgatacctccgagtgggtggaaatctcttactttgggcagaatgcgtatgtgtttgcggaatttgtgacgatcagtgagaaagagaagaccgcacttgcgaccgcgacgccctcgccgaccccgaatgcggaagacggcacgaccgatgacaacggggacagcggtgacgcgcaaaagggcagcgaggcatcgccgacacccgctcccaccgcagagccgacgccgaatgcgaataatcctatcatcgtaaacggcggtaaccgagagaatacgagctccggcagcacatcagacggcatgacggcagagaccattcgcgatacggaagacccggagcgacgctgaggtaaactatgaatgtgttagttataggctgcggcctgcttgggcgaaaaatcgcccgcaccatggacgaaatgggttgggacgtttctgttttaagcaacattgaaagcgacttggagcttttggaaaacgacttcgagggcgtgacattccgcgggttcccgatggatattcgcaacctgcgcgaagcgggcattgaaagctgcgacgcggtggcggtaacaacggcggacgataacctcaatatcacggtggcgcagattgcgcgcgattactttggtatccaaaacgtggtggcgcgtgtatccgaccccgcgcgtgaattgatttttgagcatatgggattgcataccatttgccccacaaaccacgccggcgaccgcattgtgcggatgctgagcggagaaaaaatgaacaagaaactcgagttcggtctgcatacggtcgactttgacgtgcggccggcagagcggcatcagatcggcaagaatgtgggcgaactgcacggcaacccgggcgaagtggtgttcggcatcatccgcaaaaacggtgcgttcgttttagcggggcttgcacccttgaagctcgaggcaggcgacgagattgtgtacagccgcgcaatcgattaaggggggaagtgccatgaacattgtcattatgggcggcggcaaggtgggcgaaagccttgcgcgccgcattttggagggccgccgccacgaggtgcgtatcatcgagagcgaccgcgcgcgcagcttacagcttgcaaacgcgctggacgtggagatcatctgcggcgacggcacgaacattgacatgctggaaaacgccggtgtacgtgacgccgactgctttattgcgatatccggtgacgatgcgaataatctcgttgcgtcgcagcttgcaaagcagtatttcggcgcgaaaaaagtgattgcccgcgcaaacgacccgcgcaatttggagacgatgcgtgtgcttggcgtggattatgcggtgagcagcacggaaatcattgcgcagatgattgagcaggaagcgaacctgatggagtttcatcttgtggcatcgctgaacaagggccgcggtcagatttgctccgtgacgcttggagagaattcggttttgcacggcaagtcggtgcgtgaggtggtgttcccgaagggggcgctgctgatttccattgtgcgaaataacaagctcatcattccgggcggcgacacggtgctgcaagcgggcgatgagattattgcggtatgcgaggaacgcgcacagaaggcacttatccgtttgatgaacagcacgcatgcggatgagaaataagtcgattttttatgatttatatagcaggaaccccgtaggcacgttgtgtgtttacggggttctgctttgttcatttaattctaatgatttgcggggcaaatcatgcagggaatccatgcaaccgggtttccgacggttctggttttgtgaaggcaaaaagtgtttcgcgctctgcggagcgcgacttggggcgctgccccgagccccataaactttttgaagaaagtttaatcaaagacttttaacgttgcagtattatgaattttggcggctttattttacagctttaaagtgctttgtgacgctggtgccgtcttcgtagacgtctcttgtcaaattaaggcctgcgttcatcagcatggcgccggaatagacggtgccggtctcctcgtcctgatagtacgttttggggtcgaggccgcgcaggcgctgcacgcagtaacgggtctcgggctgacgcatgacgacggcagtcatcatggcttcctgtttatccggcgaaacgaactcccacgcgcagtaaaagtcattctcggtcggggagacgaggcggtagaaatcgccctcgcggacaaggcggtgatatttgcggtagtcggcgatctgctgctttacttcggctttttcgtcatcggtgagctttctggggtctaactcgtagccgaatgtgccgcacatggcgacgttgccgcgggttttaagcgaggtgcgcgggcgggctgcgacgtgtgcgccaaacgaggagatagggtagcacatggacgtgccgaactgaatggtgaggcgctcgatggcgtcggtgttgtcgctgcaccagatctgcggggaataatacagcatgccggcatcgaaacgtccgccgccgccggagcagttttcaaagaggatattcggaaacgctttgacaaaacgatccatgaggtcgtatgtaccgagcacgaagcggtgcatgacctccttctggcgctccggcgggagcagcgcagagccgacctcggtcagattgcggttgaagtcccatttgacgtaatcaatcttattttcactgaggactttatacatctgcgcgaagatgttatcgcgcacgtcttttctcgtcatatcgaggacgtactgcaagcgtgcgggagagttttcacggttcggcacgtgcaggcaccaatccgggtgggcgcggtagaggtcgctgtccggggaaatcatctccggctcataccagatgccgaactttaagccctctgcgttgacgcgctcgatgagggagctgagaccgcctttgagcttcttttcgttgacataccagtcgccgagggaggaatcgtcgctttcgcggtggccgaaccaaccgtcgtccatgacaagcatatcgacgcccattttggcggcttcgtgtgcgaacgcgacaagcttatcatcgtcaaaatcgaaatatgcggcctcccagctgttgatgagcacggggcgttccacatcgcgccacggactcttgatgaggtgcttcatgtaggtgcggtggaaaatgcggctcatctcgccgaggcccttatcggtgtagaccatgacggcttccggcgcggtgaaggattcgtttggctccaggcgccaggtgaaatcggtggggttgatgcccgcgagaaggcgcgtggcgttcaaacaatccacttcggcttcaatggagaagttgccgctgtaaatgaggttgacgccgtagacttcgccgttttcttcggtggcgccgtgggctttcagcgcgacgaacgggttgtggttgtgtgaggaggagccgcgcttgctttggatggattgaatgccgtggcagagcgggcgctctgtaacggtgcgctcctttgcccacttgccgtaaaggtgcaccatgtcgtaatccatcgtgttgaagtcgaggcaggtgctgaacacacgctcaagctccatggcgcggtcggacgtattcgtcacgacggcgtgacgcgtcatgacaggcagatctttgtaaacggtgtagtagagcttcacttcggcgtttgtcgtttggtcgagcgtggtgacctcgaacgtttcgctgtcaccgttttcgtcgcgcagagacggcatgccgggcagcgcaggcttttcgcttaaaatgcggtgcgaaacgtagcggatgtcggttgcgatattgccgtccgcgttgcggatttggagtgcggagatgcggaaatcgccggtgccgttgcaggaatattcgctcggctgtgtatccggggaaaactccgtgccgacgtagcctgcggcgtcgggcgtgaaggagccgaagtagccgcggtccaataaatagcgcatgtcgcagtccggcaggtatgcgccgtagtagaggtgcagcaggcggccgctgtcatgcacggcaaaaacgtaactggaggaagcggtatccagcttgaaaattttcttttcggcatcaaataaaatcgccataagatcgttcctttcgggaaaacataaaaattcgggcagagaaatatccgtttataacaacagtatatcgtttatgcggcttttacgcaataggcatttgttgcataaagttggcggtttgtgatgctgcgtacggcgcggacttcggcattttgctaaaggcggcgatgaaatttggtggaattgtgatagaaacagctttttcggaaaaaatagctttacttttctcttggtttgtattatagttaatgtgatgtggaagcggttacacattgtaaaggactgcatgtgttcgctttcgaatgtcttttgaaaaaatataaaatggaggaaactacaatggctaaaattatcggcaatgcactcccgaacatcccgtggcaggataagccgcagggctacgataagccggtttggcgttatgaccacaacccgatcattccgcgtgatctcatccccacttccaacagcatcttcaactccgcagttgtcccgtttgagggcaagttcgctggcgttttccgctgcgacaaccgctctgttgagatggacatcttcgcaggcttctccgatgacggcatcaactggaagatcaaccacgagccgatcgacttccagccggctcccggctgcgacccgtgcgtaacccgcaaggaatatcgctatgacccgcgcgtttgctggattgaggaccgttactacatcacctggtgcaacggtttccacggcccgacgatcggcgtaggctatacctatgactttaagaccttctatcagatggagaacgcttacctgccgtataaccgcaacggcgttatgttcccgaagaagatcaacggcaactttgcaatgctgagccgtccgtccgacaccggtcacaccccgttcggcgacatcttctacagcgagagcccggacatgacgtattggggcaagcaccgctatgtcttcggcacgagcagtcactccggctggcagtccaagaaggtcggccccggcccgattccgatcgagaccgatgaaggctggctgatgatttatcacggcgttctgaactcctgcaacggcttcgtttatcgcttcggcgtagcgcttcttgaccacgagaagccgtggatcgtgaaggaaagaggcaacttctatgttttcggtccggaagagagctatgagctcaccggtgacgtgccgaacgttacgttcccgtgcgctaccctgaccgatgccgacaccggccgcatcaccatctactatggtgctgccgacaccgtcaccggcatggccttcaccaccgttgacgagctgctttcctacatgagaaagtacccgcacgaagtataagacaccattgtacaaagaccgcctgacggcttagcacactgttgtcttgatcgctttggttaaattagaatagctttttcgcaggcgcttccgtttttcgggagcgcctgttttttatggaattgttgtattttacggcaaaatctggtatgatgaagctatggaaaaccgcgatgggcggaaaacggttaggagttgtatgaatatgaaagagtatgtcattgagaaaacggtgggtgcgccggactggacaaaggtgccggagctgcaggtggacaatgtttgttggttgccggacgcgggcgtgcgcatggagcagcagatctgccacgacgacgagaaaatctacgtgcaccaagtggcgcacgaaaagaacatccgcgcggagttgaccgataagctcggcagcatctgcacggacagctgcatggagtttttcttctccccggtgccggaggacgggcggtattttaacattgagctgaacttgaacggcgcgattttccttggcttcggccacggcagagcagacagcatccgtttgatcccggaagaccacaagaagctttttaacatccgcacgaacaaaatggcggacgggtgggaaatcttttatgaaattccgctcgaatttctgcatgtattttaccccgattacgactttaaaagcggacgtgtgatccgcgcgaactgctttaaatgcggcgacctcaccgtgcagccgcactatatgatgtggaatgagacgacgagcgaaacgccggatttccatcgtccgcaggactttggccgcatgatcttcgcgtaaaccgcggtattcagcgggatattcatggattagtccaatatcttttgccgaagcccgcgcagaattgtcgtttttccaagttgcaaggtgagcgaatttccagtaaaatagtaataatgggtaaatgaaaaatatcgcaaaagttttgcatagcttatgcgcctgacgcaaaactatcgtttagagtattgcgtcggcaggaaaggattggtgtgcatatgccactggaaaggatcgacagttattttaacggcgcggtggagtcttatgacgagcgcttgaaacgcagcgcagaggatgaagacggctacattcgccgcacggcggagtttttcccgaagaaggagcacctgcacattctggacatcggcatcggcacaggcacgggtcttacggcaattttagagcagaacccgacgatttatgtggacggcattgactgcgcggataagatgctctcggaaattccgaaaaatctgccggagcacaaggagcgcatccgcacgatttgtggtgatttctttaaatatgagttggagccggaaagctatgacggtgcggtttccatgatggcgctgcattattacagccgcgaagagaatttggagctgtttcaccgcgtgtgccgcagcattaaaaagggcgggttctttctgttgagcgacaaattcgcgccgacgcagatgtatgaggacttctgccgttccgagtttgagcagaagcgcaaggagcagcatttgtcggcagacgagcattactattgctttacgccgcagtatgtggcgggcgaagcggcgctgcttttcaaagcgggctttgcagaggtacgcgtgtgctgggcgaaatccaacacggcagtgcttcttgccacaaaataaacaaataacagttgaaaagccagtcgaactgcgtacaaataaacggtacgcgtcttgaccggcttcttttttaatgctataatgtttcaaaagcaactattttgggaatgggtgaatacttttggaactctttaacgcgcagcatgttttgcacggcgagcctgtgacgggcgagctgccgtctacgaactcgcttttcaaaacgaccatcaacatggcgtggccttcgatggtggaatcgtttttggtggcgctcgtcggctttatcgataccatcatggtgagcacgctgggttcttacgccattgcagcggtgggcctgacgcagcagccgaagttcatcggtttggcgctgtttatgtcgatgagcacggccatctcggcgctggttgcacggcgtaggggcgagcagaaccgcgaaagcgcggtgcgcattttgaaaacatgcattctggtcgccgtgattttgacggcgatcatcagcgttacgtttacggcgtttgcagaccccattatccgctttgcgggctcggcggacgatacgcatgaagcggcggtagagtatttccaaatcatcatgggcggcatcgggtttacgaccgtgatgatgatcgtgaacgcggcacagcgcggcgcgggaaacacaaagatcgcgctgcgcacgaacatggtctctaaccttgtgaacgtggtgttcaactatctattgatcggcggcaacttcgggtttccggcgctcggcacgcgcggcgcggcgcttgcgaccgtcatcggctctgtgctcggctgcgcgatgagcttgcattccatgttcgcgaagtcctcgtttgtgtatatccgcggcgtgaaaggcttttttacctcgaggtttgacgtgcgctcactgcttaacgtcggttccagcgcgtttgtggagcagattttcctacgcatcggctttttgctgttcgccatcaccgttgcgaacctcggcaccactgcgtatgctgcgcaccagattggcatgaatatgatgagtttgacgttctcactcggtgatgggctttcggtggcgtctgtggcgctgatcggcaggagtctcggcgaggaacggcgcgaccttgcaaagctgtacgcctccatgtgtcagcgaatcggacttttctgcgcgtttgtgatgtcgatggttttcctgttcttcggcaggaatctctatggactgttttcgaatgagcaggaaattctcgatatgggtgtaatgattatgcgtatgctgtgcgttatcatttatctccagatcacgcaggttattttcttcggctgcctgagaggcgcgggcgatacgaagtataccgcgtttgcgtctatgatcagcgtcgccattatccgaccgggcttaagctggctgctgtgctacccgctgggactgggactgctcggcgtgtggcttgggctgttcggcgaccaatttatgcgattctgccttgggtatttcagaatgaagcagggcaaatggctgaaaattaagatttgacgcgtttacgacaacgatagcggagcgacgaataaagtctttgtccagctttcttcgagaaagttggtggggtcttggggcaacgtcctaagtcgtcgttcgcaaacgacgaaataccttttgcctaacccaaaacgaggaaggcagcttgaaacatccggtggacgtttcaagcgtagggaacacagttgcatgggttccctgaaaggcggtctgcgactgtctttcgaaattcaaataagataaaatagaagcaaaaaatctccgtctttctctgaatcaaagaggaaaacggagacttttatattttaaaatagtgattattccacaacgaccgtgcagtgctcggtgccgtagtattccatcgcagagatgacctcaggggtcaggcgctcaccgcatacagcaagcggcaccgcgggtgggcagctcacgttggcgtctgccaaaatgcggttttcgcactcggaaagcggcagcgttttactcggcgagaagagcgcctcgcgcggggaaagtacacgctcggcatgcggcggcacaggcggctttgaaaggatcgccggggcgggcagaacggagagcagcgcgcgctcgagacgggcgaaatctgcgggtgtggtctccggcgtgaacatcatcacaaggtggtctgcgtcggaaaactcgcagtaaatgttgtggtgcgtcaaaatttccgccagagctgtgcccgtgtagccgaaggacttcggcagtaggcagagctttgtgcgctcctcgccgcaaagagcatagccgtgcgcacggagctttgctttcagcgtgtcaagacgctccgcacaggctttgagctgtgcgggaaaagatgttgctaaaagcggattcattgcgtcgagcgactgcaaaatgaggtaggacgggctcgtggacgcaaagagcgccatggcgctttccgcacgctgcgcgaacatgtccggcgtgccgtgcgcgatgtgcagatacgcgccgcccgttaagaccggcagtgttttgtgtgcggaatcacagcagatgtctgcaccgagctgcatggggtgcatgggctcgggcagaaaatgcaggtacgcgccgtgggcgttatcgacgagcaataatacgccgtgttttttgcagacggtggacagggacttgatgtccgcgatgttgccgagataatccgggcttgtgatgtacacggcggcagggttttccgatacgatcacgtcttcgagctgcgcgggggtgatggcgcaggaaatgacgctttccgtgccgtagatccagcgaatgtcaaggtcgagcagcgctgcggccgtcatgaagaccttgtgtgcgttacggcctgccgcaatgacgggctttttgtgatttgcgcgggcatgcagcagcgcaagatacagcatggcgcggatgcacagggacgagccctcggcggagtagaccgtctttttggtgccgaataacgcggcggcgttcgcttcgctttcgcggatgatgccctcggcgtggtagagcacgtctgcgccctcaatctcggtgaggtcgagcggctcggggccgagcagcacggtgcccttgtggcccggcatgtgcatgcgcaaagcgccgctatatcggtagcggcgcacaaattcgcagattggcgcggttatcatgcgttgttatccaatgccttggaggcttcgagcatgatggcgcattccatgcgttttttaaagagctcgcagccctctttgtaaacgccgcggacggagccggtggcgtggtaggcgtttgcggcgcagccgccggagcagtacagtcttgcccagcaatcgcggcactcggggtgagcgtacacgttgcaggagacgaaatccgcctgaatttctgtgttcgtcacgcctgtccagacatcgccgaggcggaatttttcgtcgccgacgaactggtggcaggggtagaggtcgccccacggagtgacggccatgtactctgtgccggagccgcagcccgaaatgcgcttgtaaatgcacgggccgccggtgagatcaatcatgtagtggtagaacgtgaacggtttgccggcgcggcggcgctccagcatgagctcagcaagcttttcgtactgctccatgacgatgacgcggtcttcgtcggtcagcgcggaggggtctcccggtgcgcagacgaccggttccatgctcagttccgtaaagccgaggtcgagcatctgctgaatgtctttgagaaaatccgggtttgcgtgcgtgaatgtgccgcgcatgtaatacgccttgttgccgcgcgccttgacgagcttctggaatttcggaacgatgcgatcccaactgccgttgccggcgtagtctacgcggtagcggtcgtgcacttccttgcggccgtcgaggcttaaaacgacattgctcatctcgcgatttgcaaaatcaatgacgtcgtcgtcgatcaaaacgccgtttgtcgtcaacgtgaagcggaagtgcttaccgcattccttttcgcgggaacgggcatacgcgacaagctgctttacgacgtcgaaattcatcagcggttcgccgccgaagaagtcgacttccaaattgtggcgcgtgccggaatgttcgagcaggaaatcaagcgcctgcttgccaacctcaaaggacatgagagcgcggtcgccgtggtacttgccctggcttgcaaagcagtaggagcagtttaaattgcaggtgtgcgccacgtgcaggcacagcgccttgacgacgttggcgcttttcgctttcagcgcacctgccatcggctcgaacgtatcgggggtgaagagcttaccggcatcgcgcaactcttcaatctgctcgtagcactcgttgatgtcggcttcggtcacgtcctcacggtcgccgtatttttccagcatagcggcggtaatcgcctcgcggctttcggtctcgaacaggccaatcatgtcataggcaacttcatcgacaaggtggacggagccggaacagatatcgagcacgatgttcatgccgccgagtttataacggtgtatcatctaaaaaaatcctttcgcatctatacatgaaaaaagccgccaaaaaaggcggcgttttctgaacctttgaattacttcgcgttcttctccgtgttctcgcactgctggtttgcaatgccgcagctcgtcttgcaagcagactggcaggaagtctggcactcgccgcagccgccgttctttgcgctttcgcacaggttgcgggtctcaagcgtctgaatgtgtttcatatcatttcgcctccgaattgttactttataagctaactttattagccttaaaattctaacacagatagggcgggatgtcaagatgcaaagccgccggatttcgggaaaaagcatgtccccacgccgtttctgacgtggggacacggaaaataggatatcggagaaatcagttttaaggagtgttttgaatcagtcaccgaaagcctgggaaagatcggcgatgatgtcatcgatgtgctcggtgccgatggagaggcgaatggtgttcggctggataccctgctctgcgagctcttcttcgttgagctgcgagtgcgtggtggaagccgggtgaataacgagggacttcacgtctgcgacgtttgcgagcagagagaaaattttgagtctgtcgatgaacgcctgtgcttccttagcgccgcccttgatgttgaacgtgaagatggaagcgccgccgttcgggaaatacttcttataaagctcgtggtacgggctgtccggcagagacggatggttgacgctttcgaccttcgggtgcttggagaggaaatcgacaaccttcagcgcgttctctacatggcgttcaacgcgcagagagagcgtttcaagaccctgcaggaacaggaatgcgtgcagcggagcgagcgttgcgccggtatcacgcaggaggattgcacggatcttcgtgacaaaggctgccgcgccgacgtcctttgtgaagctgatgccgtggtagctggggttcggctctacgagggacgggaacttgccgctgccttcccagtcaaacttaccgctgtctacgataacgccgccgattgccgtgccgtgaccgccgatgaactttgtagcggaatggacaacaatgtctgcgccgtactcgaacggacggaggaggtaaggcgttgcgaatgtggagtctacaacaagcggaatcttatgtgcatgtgcaatggctgcgaccttttcaatgtcaatcagcgttgcgttcgggttaccgatggtctcgatgaagacggcctttgtcttatcgttaatcgcgttttcaaaagcgccctcttcatccgggtctacgaacgttgcggtgatgccgtactgcgggagcgtgtgctcgagcagattgtaggtgccgccgtagatggtcttcgcggaaacgatgttgtcacctgcgcttgcgaggttgagaaacgtatagttgatggctgctgcaccggaagcgacgccaagtgctgccacgccgccctcaagggctgcaatgcgctgctcaaatgcgtccacggtggagttcgtcagacggccgtagatgttgcctgcatctgcgagcgcgaagcgggctgctgcgtgtgcggagttcttgaagacgaaggaagtcgtctgatagatcggcactgcgcgggcatcggtagcggggtccgggttctcctgacctgcgtgcagctggatggtttcaaaatggtagttgttatcatatgtatagctcatggtaatacctctttcataatttcagaatttaatttttgttttaacggattttgagaagttgacgaaaagctgagcttcacattcgtccgtttctgaaattgtggcgaagcatttgccggaaaagggatcgcatcatcggggtgcgcctcctttgagatttacttcggtttttatgtttgaaggtttcataacactcaaaacatattgacttggtatgttttgtatgatacacgttagtttgcaatttgtcaacccctaaaatgcaaaaattgaagataattttcggaaaccatactattatatgggggaaactgcattttgcattgcaaagcggcggatcgtttcaacgaattttaaaggtaaaggaaaaagtgaaaaaagatgttgacaaatttgccctgtggtgataggatataagcaagttaaataacctataaaataagtaggtttcataagcttagtaaaataaggcaagggagagacgcgatatgaacccgtttccgtacagtcggcgatgttgcgccgcggcctgaaacgatacaagaatgcaaactcatttatataaagtattttagggagactttaccatgcgtgtatatcggaaaatcacagacctcatcggcggcactccgcttcttgaactcaccaactacgaaaaagcaaatgaactgaacgcgaaaatctacgcgaagcttgagtatttcaacccggcaggcagcgtaaaggaccgtatcgcaaaagcgatgttggacgacgccgaggaaaagggcctcttgaagcccggcgcagttatcattgaaccgacaagcggcaacacgggcatcggccttgcttccgttgcggcttcccgcggttataaggtaatccttaccatgccggagacgatgagtgtggagcgccgcaaccttttgaaggcttacggtgcggtgcttgtcctcaccgaaggtgcaaagggtatgccgggcgctatcgcaaaggcgaaggagctcgccgagcagaccccaaacagctacattccgagccagttcacgaacccggcaaacccggcggtgcacctgaagacgaccggcccggaaatctgggcagacacggacggcaaagtcgatattttcgttgcaggcgtcggcacgggcggcacgctctccggtgtaggcgcgtacctcaagtcgcagaaccccaatgttaaggttgtcgcggtggaaccggctacctccccggtcctctccggcggcaaggcgggcccgcataaaattcagggcatcggcgcgggctttgtgccggatacgctgaacaccgacatttacgatgagattttccccgtgcagaacgaggacgcgtttgcgaccggccgcgcgctggcacgcagcgagggcgttttggtgggcatctcctccggcgcggcagtctttgcggcagcacagcttgcaaagcgcccggaaaacgcaggcaaggtcatcgtggcgcttctgcccgataccggcgaacggtacctctccacgcctatgtttgcagactgatacggcatacaagaatccaaacacacatctttgggatagaaaaatgaatgagggaaaggggcatggctttcgggctttgccctttttcgcgagtttaaaggagtttatagagggcgttttcgcagtaaattaccggcaaaaataaaactcttgaaaacctactaaaaacatgttattatggtataaagtttgcggcggacggtgagcccgcttgttttattccggaaacgctattttacataaaggatggataccgcatgaaaatttccaccaaagggcgctatgcgctgcgcatgctgctggatctcgcacagcaccagaatgacggctacgtcgcgctgaaggacattgcccgccgtcagaatgtctccaaaaaatatctggagcagatcgtgccgatgctcaataaatccgatattcttcttgcaagccgcggctttcagggtggatatcgtctggcgcaatcgccggataaatacaccgtgggtatgattctgcgcatcacagagggcagtctcgcgcccgtcgcgtgtctcgatcacgaccccattctgtgcgaccgcagtgcagactgcatcacgctgcccgtgtggcaggggctcagccgcgccatcaacgaatacctcgacagcatcaccctgcaggatatattggatcagcagcaggcgacttttgtcaacgattacagcatttgataaaaaagataccgcattcggtttgtaggctgaatgcggtatctttctatttgatttgaaatcactcgccggaatttaacagcgcttcggcttcatctgcgtccattttgtctacgttatgtagcttcctttgaattgtcgtatttctcttttgcgcagcctcgatacttgaaccggcttcatcgattttcttctttgctttagcaaggagagattcaaacaaatcatattgtgagcttacggcactgagcgtcttttgaatttctgttgtctttttgtttagtgcgatagtgcggaaaccgacattcaacgtgttgagaaacgcggtgattgtggtcggaccgcagatcatgatgcgatacttgttttggatttcctcgcacaagccgggacggcgcagcacctcggagtaaagcccctcggtagcaaggaacataatggcaaaatccgttgtctttgggacattgatgtacagctcggcaatcgtttttgcctgatttttaatgttctgctccagagctttttgcgcggcttccagagcctctttatcggctttttcggcagcctcgcaaatgcgtatgtagtcttcttgcgggaacttggagtcgatggggagccatacggtctcgccgtctttttcacgggaggggatcttaacggcgaactcgacgcgctttgtatcatttttcgtagatacgttgcagtcgtattgatctttggtgagggtttgctccagtatattgccgagttgcacctctgcccatgttccgcgcgcttttacatttgtcagcacgcgctggagtgcggtcacatcgccggtgatcttacgcatttcgccgagtgactcgtaaacacttttaagctgctcaccgacgactttaaagctgctgtccagacgtttggaaagcgtatctgtcaacttttcatcgacggtcatgcgcatctgttcaagcttcttttcgttgttttcttgtagagcggttaaactttttgtaagcgtttcattgatatgttcattctgccgtgcgctgatttcgcgcatttgctcaagttttttctcagtgctttcctgcaaagcttttaggttttgtgttaaggcgctgcttattttttcattctgctccatattggcttgacgcatttggtcgagcttcttttcattgctctcgagtagtgaatcgatattcttcgtcaaggttgtgctgagcttttcgctttgctgcgtgttgatctgctgaatttcgcgtatcagggcgttcatttcgctcaaacggctgtttaagctttcggatgtttcttttcgactacgtgaaaactcatcggcaatataggtttcaatatgctgaaaattgctttcgtaattcgtatttgttgccgtattatcactttttggcttcttgagaagaaagacaatctgcaaaataagaacaattgtaatgagtccaatcaaaatatatagttccattttcattctcctttgttttttctcatgttatcacaagtgatttgaaaagtaaacaaccggtctatagttatatgtagaaaagctcccccgaaacgaattcgggagagcttttgtcatacaatgttattatatttgcttgcggacgatggtgtattcgtcgccggggcggtagtacgggcagttttgaaagcggccgccgatgaactgggcggtctcgtcctcgtctaagtccatatcgcagacatagaagccgtactcatcgtcgtactcgtaatacaggcagtcttcgcattttgaggtattttcaaacatgctatcgccttacagaacgctttgcaggaactggcgcgtgcggtcgtgcttcggatttgtgaagatctccttcggggagccttcctccaaaatcgcgccatcatacatgaacaccacgcggtctgccacttcgcgggcaaagcccatttcgtgcgtgacaacaagcatcgtcatgccttcttccgcaagctccttcatgacgttcagaacgtcgccgacgagctccgggtcaagggcgctggtgggttcatcgaacagcatcattttcggctccatggcgagcgcgcgggcgatggccacacgctgctgctggccgccggaaagctttgcggggtaggaatcgagcttatcgccgaggccgacctgatttaaaagcttcacggccttttctttggcttccttttccggcacgcccttcacgttcatcggggcgagcatgacgttttgcagtgctgttttgtgcgggaagaggttgaagcgctgaaacaccatacccatctcaagcagaatagcggcgcgctctttatgcggcagctttacctgattgtggccgttcacgcggtcttcgatgagcttgtcgtcgatccagatcttgccgctcgtaggcttttcaaggtggtttaaagagcgcagatatgtcgatttgccggcgccggacggtccgatgatgacgaccacttcgcccggctctacggtgaggctgacgtttttcagcacatctacggagccgaaggacttacagatattttccgttttaatgatagacatagccgtattcctccttattcgtagatggacaggcgcttttcaagacgattgaaaataacggtgaacacgccggtgatgatgaggtagatgatcatagccgggatataaacgagagcgctcgccttgttggaagcgataatcttcgtctggtaggtcaaatcggtcagcgcgatgatggacacaagagaggtatccttcagcaccatgacgaactcgttgcagatcggcggaatcatgcggcggtaggcctgcgggatgatgacaaggcgcatcgcctgcgagtgggtgagaccgagcgccgtggaggcttcaagctggcctttatcgatggactgaatggctgcgcggatgatctccgcgaggtaggccgcgacgttcagcgagaacgcaatccaagcggccaaaaagcggctctgaatattgaacgccggaacgagctgcggcagcgtgtaatagaggaaaaacagctgcatcagaagcggcgtgccgcggaagaagaagatgtacgcgccgcagacggagcggagtacggtgtttttggagatcttgccgagggcaagaaacacggcgagcacgagtgccgtcagcacggaggtgacagaaagcgcaagcgttacgccggtggcctggagcagcgccggcatccagccgatgatttgttgaatggcgttcatggtgatatcctttccgatataaatggggcaagagacctcaaaacggggcctcctgccgaaatttcattttacgttattgcgcttatgcgtccttctttgtgacgatgacgagctggttggagaggtacggctcggtcatttcatacgcttcctgacgctccggggtgatggaaacgccggcgatgatcatatcgtactggcccttatcgaggcctgcgaaaacgccgtcgaaggaggtgttgacaaactcgacctcaaggccgaacagcttgccaatctcttctgccatatcaacgtcaaagccctggtacacaaggccgctgtcgtcggtgtactcaagcggcggataaccggcctcaaagccgatggtcaaaacgccgtccttaacggtcttgaccttgctcgggtcaacggtcggttcctcggtgacgttgcgcacgccctcggtgacatcggtgccgaagtgcttcatggcgagctcggagattttgccgttataataaagcgtgttgatggcgttttcggtctgctccaaaaggtctgtgttgcctttcttgatgcagacgcccatcggttcgccttcgtcgcttttccaaacgctctggaatttagagtcgtcgtctgcgaggtaatacgccgcgacaacgctgtctacgtacacggcatctgcacggccgagcgaaacgtcatcaaagcactgcgtaatcttttcatacgggagaatctcgacgtcaacgccctcttcctgcattttctgcagagcgtcgtgggcggtggtgccggtctgcacgctgaccttggcgccggcgaaatcgtccgggctttcgatcttctttgtactggagctgctgcatgcggtggcggagagtgccattacaccggcgagcacggcagcaaggattttcttcattttcatgtgttttgtccttctttctcaattttccccgataaagagatacagtcgtttcactgtaccaatcgattagaatacttgtattctacccccaaaatccgtttgggtcaatagcgaaactgccaaattaatgtatatttatacatatatacataggtatttttcaagatttgtgggtaaaatcggtgtttttacttcaacgtgacaatgacaagctgattcgagacatacggttccgtaaggtcatacgcggcctgacgttccggcgtaatggacacggacgagatgatgacgtcgtactgctctttatcaaggcccgcaaaaatgccgtcccacgcggtgttgacaaactcgatgtctacgcccagcacctcgccgagcgcttttgcaaagtcgatgtcgaagccctgatattcaagccctgcgtcatcggtgtactccatcggcgggtagccgacttccacgccgacggttaaggtgccgtccttgagtgttttaagcttagaaaggtcaagcatcggcttttccgtcacattgcgtatgccgtccacatcggcggcggagccgaagtgcttttcggaaagctgcgccatggtgccgtcataatataaggtatcaatcgcgccttcgatgagctctttcaaatcgtcgttgccctttttaagacatacgccgattggctcgccggtttcgctcgtccatgttttctggtatttcgtgtcgtcctccgcgaggtagtaacccgcaacgacgctgtccacgtacacggcatccacgcggccgagtgcgaggtcatcaaagcactgcgtcaccttttcgtacggcagcacgttgatgttcatgccctcgtcctgcatatcctgaatgctttcgtgcgcggaggttgccgtctgcacggaaattttcgcgccctcaaagtccgccgggctttcaatcttcttcgtactgcccgaacatgccgcaagtgagagcatcatagcgccaattaaaaatgaagcgcaaaccttttgaattttcattttacattcacccttccgcaatatacctttaagctttggcttgtataattttgaagatgaatgtattttacgccgatttcattcaaaaatcaagcggaataatgcacaaactaatgtatatttatacgtatatacatggtgaattttgaaaaagaaaagcctgcgttgtgcagggtctcaaaattagagttgcataacgcaggcttttagaattcggtttagtccatgtaaccgccttgcatgggggagtgtgccgtttgcgtgaagcgttttaaaacgccgtgcgtgtagcggctcttaaacggtggcagcgctttgcggcgctcgttaaacacgtgctgcacttcttcctcgctgcatttttcgccgttgataccgatgacgcgcagaatacgctgcggaatgtcgatctcgataaggtcgttttcttcgattaaagcgatggggccgccctgtgcggcttccggcgaaatatggccgatggcgggacccttgcttgcgccggagaagcgaccgtccgtcagcagtgcaatgctggcagaaagctccgggtcgctcgaaatggcttcggtggtgtagaacatttccggcataccgctgccgcgcgggccttcatagcggatgatgacggcgtcgcccggctgaatttggtgcgttaaaatggcgtggatggcatcttcctcgcagttgaacgggcgcgccttcagaagcgccttgtgcatctccttcggcacggcactgtgttttacgaccgcgccgtccggggcgatgttgccgcgcagaatggcgatggcgccgttcgtgccgatgggatcatcgaacgagcggatgatatccgtgcgcttgagaccggttttctttaaataggtatcacacttctcgtagaagccgtttttctttaaatcttccagattttcgccgagcgttttacccgtgacggtcattacatcgagatgcaggtggtctttgatttcctccatgatgcgaggtacgccgcctgcataatagaagtactgcgcgggccactcgcctgcgggacggatattcaaaagataatgcgcgccgcggtgcatgcggtcgaatgtatccgcgtcgagcggaatgccgaactcatgcgcgatggcgggcaggtgcatcagcgtgtttgtggagccggagatggccgcgtgtaccatgatggcgttttcgaacgatttcagcgtgacgatatcggacgctttcatgccctttttcgcgagtgccacggcggttttgccggcttcctccgctgcaacggaaagatcttcgcaggtggcgggcatcagtgccgtgccgggcagcatgaggccgagcgattccgccataatctgcatggtggacgcggtgcccatgaacgagcatgcaccgcaggaggggcacgcgtggtgcttgtaatacgtgaactgctcctcggtgatctcgccgcgctcatacatggcgctgtatttgccgatctgctccagcgttaaaaggtcgggacccgcgtccatcacaccgcccgtcacgaacacggccggaatattgatgcggccgatagccatgagcagcgcaggcacggatttatcgcagcttgcgaggaaaacgccgccgtcaaacgttgtcgcgttggcgtgaatttccacaaggtcggcgatgatgtcgcgcgagggcagggaataattgatgccatcgtgcccctgtgccatgccgtcgcaaatatcggtcgcaaagtaaagcgcacccttgccgcccgcttcgtatgcgccccggcttgctttctgcgccaaatttaaaaggtgcgcggagccggggtggctctgcccgtaggtgctttcaattaaaatctgcggctttgtgaggtcctcctctttccagcccatgcccatgcgcagcgggtccatttccggcgcaagcttgcgaacttcctgacttttcaacatgttgattccctctttgatgataactttatgcggcagcaaatgcgccaatctcaaaatcggcataggtgccgtctttattttgctttgcggtgcagtctaaaaagtaggaggcaccgttcccggcacgccatttttcggcgtcaaacgtcagcacgccgttttcatcgtttttctccgtgatcttaaataagcagccgtcttcccacaaaagctcgtccgtttctaagtagccctcgtcttgcagctccttaaacgtgaacgtgagcgggcggcgctcggtaagctcgccgaaccgccatgcgatcgcctgtatctcgcctttcgtcaacggcgtctcggtcaggtcaacggagacatattcggtgtcgctttgcagcgtttcgtccgtgttgaataattcctgcagcacggataaatacagcgcgcaccgcccgtctgtttcattttcgcgtacggtgattttctgcacgttatcgggctcgctcgggtaaatggctttgatatatccgccgtaggtgacgtccaccatcatgcctgggatgaggccgtccggcgcgtcctttggccttgcgcagcggtacacgccgtcgtcttctccggcgagcaaaagcagattgcccgaaatatcgacgaggcgtgcggtgagcgttgcagtctcggccgcgctcggttctgatgcggtactttgcgggttatctacgccgcccgaggatgccggtgaactttggcaggcggtgaaaagcagaatgatgcacaaaagaaaagcgaataaatgggcttgtaaacgggtcataaggccaactcctttcattttatacgtaggaaaagggggtcacgcggttacaaaatcatcatagcagatttagaagtctgttacaagatacaaatactttttgttttgacttttgtgcttaaattgtctatactgtgtacaagttgacaaaaagggagcgaaagctatgcggcaggtagttgtaaatgatttggtattcggcagcggcagaatgaaaatttgtgtgccggtgtgcgagaagacaacggaagcgattttagacgccgtaaaagagatcaagaccaccccggcggatcttatcgaatggcgcatcgattattttgacgaggacatgtttgcggccgcgccggaaatttttaaagcagccgcgccgttgcccgtgctgtgcacattccgcacaaaagcggagggcggcgaaaaagcgatagatcccatggactattttgcgatgaacgcgcagctgagcgccttgggtgcgccgcttgtcgatttagagcttttcctttgcgagcagtacgatgacattgcaaaggcgaccgttcaggctatgcacgatatgggtacgaagcttattatctcgaaccacgactttgccaaaacgcctgcacgcgaggaaatcaccgaccgctataagcgtatgatggcgttaaatgccgacctgccgaaaatcgccgtgatgccgcagaatgagcgcgatgtgatggtgatgctggcggcgatgaatgaatccactgcgttctgcgggccgctcatcggcatttccatgggcgagctcggcaaggtgacgcgcgtgcgcggcggggcgttcggctctgtgatgacgtttgcgtcaaaaggaaaagcctccgcaccgggacaaatcgatgcagagactttatctaaaatgctgaatgaaaattaaattttaaaagtgcttttcaagcgtaaacacggttttcacttcgccgacgggcgtgtcgttgtcgttgacggtgacgccgttgttaagcgagacgagcatcttatcggtatcggcgttatagtagccgatctggcggaagatctcgcggatgatgagcggccagaccgcctcggtgccgtccttaatcttgaaggagatgccgatgcgctcctttttaaggccgatgccgtacacgccgttcgcgccgccctttgcgatgatgttcgcatcgtggttgatgagagagcacaggtagcccgtgccgcgcatcatgtgcggatattcatggatacgcgggacaaagcggcgggcagcgtcctgcagaacgtcgtccttaatggtatcgatgcacgcgaggttcttatatgccgtcgcgatgttcttcatcgggtaagcgaacaccggcacgccgcagccgtcgatgccgatgacgaccttttcttccgggtactcggagagcacgctcatggtgcgcagcacttcgttctgtccgacggagccgaccttccagtaatccttcacgtcgccgcccatttcacgctgggtgagcatgagcgccgcgtgcttgccgctgcagttgtggtagagcttcgacttcggcagaccctgacggatgcgctcttcgtttgcttccgtagagcccggcacggtcggcttcatgatgaggtcttccggatttaagtcggcctttttcatgatggatttcaaagcgttgacgtggaagctttcgccgagatgcgagcctgcgaacagcacggtttcttcatcggtaaaaccgtatttttcgtcgaggtgatgcgcgataacgggcagcgcctgcacgggcttcgaagcggagcggtagaaaaccatggcctccgggtcgcctgcggagtagatgaccttgcccttttcatctacaatgctgatgtagccgtaatgcgtcaggtccaaaagcccgccgcggaattcttctgttaaacgaacggtatctgacataatctcgtcccctgtctttagaatttaacgatttatctttctttttacgttcaaagctattataatcttttttagaggattgtaaaggcatttgtgtgagaatagtcgaaagtgcagaaagcggcgtgttttaaagcgccgcagataggacaaataaacgaaagttggtataaatatgaaagataaagtattgtttgaggtttgctgtggctgttttgaagacgccgtacaggccgaaaaaggcggcgcagaccgcattgaactcaattccgcgctgtttttgggcggccttacgccgagcatcggcacggtgcaggccgtgaaaaatacactgaaaattcccgtgatgtgcatggtgcgcccgcgcgagggtggcttttgctacacggatttcgattacgtgacctgctgccgcgatatggaagcactgttaaatgcgggcgcggacggcatcgtcttcggctttttgaagccggacggcacggttgacaccgaccgctgcgccgattttatcgggaaaatcaagaaaatcaacccgaacgccgagattgtgttccaccgtgccattgacgtggtgccgggcgtatttaaagcgctcgacaatcttatcaatctcggtgtaacgcgcgttttgacgagcggccagcgtgaaagcgcgataaagggcgcaaagaccgtgaaaaagatgatcgaatacacaagtggccgcatcgatattctgcccggcggcggcatcaacacgcagaatgtcggggaatttatcaacgagaccggcgcgcacagtgtacacgcctcggcgcgctccctgcggcacgacacaagcgtctgcggcaacccggagatctttttcggcggcaaattgaacggcgtaggtatcccggagaacgaatataaagtgacggacagcgctttggtgaaaaacgtcgtcgcagcgatcgaggcgcggtaagctttacccggagaaaggggattttaggtgaaaaacgatattgacagcattttggatgcgctgttttccggcggcaagctgaacgtgggcagcggcacgaaaagccgcgccgcaaaagacgccgaggattttttgaacagcatcgaaaaaacgaatgccgacatgcagagcagcctgaatcggcagatcagcgacctcgataagctgacgagcgacgcgcagcgcagcatggacgaaatgcgccgtctgctggacgccgagggcctgaccggcacgcccgaaacagaagcgccgaaagcggagaccgcagaaaaaaagccgaaggcaaagggcgcggaggagccgccgcaggaccccgcgcagtcgttccgcgaggcgagggaagcgacgggcagaacggtcattgggcaggacgcatttttggacagcctgttcaccgcatttcgccgcccgagcgtgacggggcgcgaaaacggcaagcccgcggcggtcgtcgtgatctccggcaaagagggcacaggcaggcacagtgcgcttgcggcttcggctgcggcgctttgcaaagagggcgttttgaaaaacggcgaggtcacgaatatcgatctttcccgctacccgaacgccgaagacggtaaattactcacacaggatcttttttccgcgctgcacagcgaaaacgatattgtattatttgaaaattttgagcagtgccacaaatctttgctgcccatggtggcggcgctgtgcgaaacgggcgttttaaaattaacttcgcgttatgctttgcagaaaggcatgctcatcgatgtcggcacggcgcttgtgcccgatgctgtcagcgaaatttccgtaaacgggaagtacctcgtctttttgacgagccaaaaggacagcgcgttcaccgatgcgttcggcgcggcatttttgtcctccgtcacggatttctgccgcacggcggaattcacgcgcgcgagcctgctcaagatcggcgaagcggcgctcgatgcattaaacgaccgcacaaaggctaagctaaactacacgttcacgttcggtgaagatgcctcggcgtttttggcggataaattcagtcgccgcgacggcgtggagagcatggcgcggctgacggaacgttgcttccgccttttgagcgaagaaaagctgcgccgcgcggaaaaggacggtgaaaagaccgtttccggcacactcggcgtaaaagacggtgtgctcgcgttcacattcccggattttgccgtcacggtggaagaagagaaaaagcaggcggcagacccgagagccgccgaagaagtgaaatcggagcttaacgagatcatcggacttagtgaagtgaaggactacgtgctgtcgcttgagcagaactatatcattcagcggctgcgcgaagcgcgcggcatgaaggccgatgtgcccaccatgcacatgatctttaccggaaatcccggcacgggcaaaacgaccatcgcaaggctcgtttcacgctatttaaaagccatgggcgtactgagcggcgggcagctgattgaagtcacgcgcgccgaccttgtaggcaaatacgtcggtcacaccgcaccgctcacgcagcaggtcattcgctctgcgctcggcggcgtgctgttcatcgatgaggcatattcgctgtaccgcggcgcagacgacagtttcggactggaggccatcgataccatcgtcaaggggatggaggaccacagagaagaccttatcgttattttggcgggctatacaaaagaaatggaggcgtttctcacggcgaactccggcttgcgctcgagattcccgaatatcatcgagtttccggattatacggcggaagagctgctggccattacaaagctgactgcaaagaaaaagggatatacgatcgatgaaacatgcgaaacgccgttgcttcaatattacgaaaagcggcaggcaacggacgccagaacggcgggcaacggacgcttggtacgcaatttggttgaggacgcgatcttaaaccagtctcgcagattgacgggcggagacgtgacaaggctgacggaagcggagcttgcggcgcttttaagcgaggattttgacctaagcgaaggatagaaacggtgtgaaaccgcatgaaaatgatgaaagtgtaaacatttatcgatttctcttgcaacttttaaaagaaagatttacaatacaagattggagagaccgaaagtttcagtaaacttccattctgtgataagcgaaagacaaccgagcgaataaagtttcgcccgccttttcaaaggcggcggatcccaaaggcagcgcctttggtcactttccgcagaaagcgaattgcgcggtccctccaagagcgtttatccaaaccgtaaattattgcgaaagggcatgagaatatgacgaaaatcgatattttttccggcttcctcggcgcaggcaaaaccacgctgatccgcaagctgatctccgaagcttttaagggcgaaaagctcgtcctcatcgaaaacgagttcggcgagattgccattgacggcggctttttgcaggacgccggcattgaaatcaccgagatgagccagggctgcatctgctgcagccttgtgggcgacttcggcaaggcgctgcatcaggtgctggagacctaccacccggaccgcattttgatcgagccgtccggcgtaggcaagctgagcgatgtgatccgtgccgtgcagaacctgcacatggaagacgttacgctgaatagcttcaccaccgttgccgatgcaaacaagtgcaaaatgtatatgaagaacttcggcgagttctataacgaccagatcgagcacgcaaactccatcattctgagccgcacggacggtatcaagcccgaaaagcttgaagcctgcgtcgctctgttgcgcgagcacaaccagaacgccaccatcattaccaccccgtgggatcagctcaccggcgcacagattctcgagacgatggagcacaagaatacccttgaagaggagctgaagctccttgccgaggagaccgagcacgagcaccaccatcaccaccatgaccatgatgagcatgatgagcactgcacctgcggctgccacgaccaccatgacgatgacgacgagcacgagcaccaccatcacgaccacgaagagcatgacgagcactgcacctgcggctgccatgaccacgatcacgaccatgatgagcacgactacgagcatcatcaccaccatcatcatgccgacgaggtgttcacaagctggggcaccgagacgacccgcaagttcacgaaggacgagatcgagcacatcctcgaggagctcgacaacagcgaaaagtacggtatgatcctgcgtgcaaagggcatcgtcgcaggccgggacggcgagtggatccacttcgactatgtgccggaggagacctctgtgcgcaacggcagcgccggtgtcatcggccgcctgtgcgtcatcggttctcacatcaacgaggccgcgatcgaagcgctgttcgcgtaatgcgggctgaaccttacagaaaggcggaatattgatggatgatatgccggtttacctgtttacgggctttctcgaatcaggcaagacctcttttatagacgaaacgcttgcggataagcgtttcaataacgggcagcgtaccttgctgctcgtctgcgaggaaggcgaggcggagtacgacgagtcccgcccctacatgaagaacatctatgtggaaaacattgaggacgaagacgagctgacgagcgaaacgcttgacatcctcgcgaaaaagcatcgcgcttcccgtgtgctcatcgagtacaacggcatgtggcagctgaaaacgctgtacgacaacatgccggaaaactgggcggtctaccaggaattcatgttcgcggatgcgacgacgttcctcacttacaacgccaacatgcgcggccttgttgtggataagctctccggctgcgagttggtcgtgttcaaccgcttcacgaaggacatggacaaaatggcgttccacaagattgtgcgcggcatcagccgccgcccggacatcgcctacgagtacacgaacggcgacgtcgaatacgacgagatcgaagatccgctgccgtttgacatcaacgcgccggttgtaaagattgaagacggcgattacgcgctgtggtaccgtgacctttccgaagatccgaagaagtacgacggcaaggtcgtcgagtataagggccttgcagccgtgaacccgcgcatgaagccgggcatgttcttcttcggccgccagctgatgacctgctgcgtggaggatatccagtttgcgggtctgctcacgctgtgcgacgcagacaaaatgccggaaaacggaaagtggtacatcatgcgcctttccgttgcgtataagtggcacaagctctacggccgcaagggtccggttctgacgcttcagaacatcgagcctgccgaagcgcccgcgcagcccgttgcgacgttctattaagcttaaattcattgcccgttggcttttcaaaagtcggcgggtaatttttttatttatttttccgtatacggtgtcgaaagtgcgcgatttatggtatactaaaaaatacttaaatatatgaaatgaaaatggtgataactttgcatacatatcagcttgttttgccctgccttttgggtgttgagggtcttgtagcggaggagctccgcgatatgggcgcggaaaatgtcgcgccggaaaacggacgtgtgctgtgcgcaggctccccggagatgatcgcccgcgcgaatatccgctcccgctttgcggagcgcgtgctcgttctgctcggtacatttgaagcgaaaagctttgaaagcctgtttcgcggcgtgaaggccctgccgtggacggagtggatcggccgcgacgacgcatttccggtcaaggggcggtgcttatcgagtcagctcatgagcgtgccggactgccaggccattatcaaaaaagccgtggtggaaagcctcaaggaggcgtataagctggagcatttcccggagacgggcgcgaactaccagattcagtttttaattatgaaagacaaggtcagcattatgctggatacgagcggcgcggggctgcacaagcgcggctaccgcaaaaattccaacgaagcgcccatcaaagagacgcttgcggcggtcatggcaaagctttcccgtgtgcgcacggacggcacgctcatcgaccctttctgcggttcgggtacgattttaatcgagggcgccatgcttgccatgcacattgcgcccggcctgcgccgccactttgcggcggaaaagtggaaagctgtccccggaaatatctgggacaacgagcgcattgccgcaaaggcacttgaacgtcgcgatgagggctttttggcgttcggctatgacattgaccccgaagccgtgcgcctgacgcttgaaaacgcgaagaaagcgggcgttgcgcagtatatctccgcagaagtgcgcgacatcaaggatttcagcaacgacggcccgttcggctgcgtcatctgcaacccgccgtacggcgagcggcttttagacgtgaaaacggcggaggacatctacaaaacgatggggcgcgtcttcacgccgaagcgcggctggagctatgctgccatcagtccggacgagcggtttgagacatgcttcggcaaaaaatccgaccgccgccgcaagctctacaacggcatgatccgctgccagtattacatgtattttaaggcataaaaaatgctttaggggagggtacatatgcggaatgtttatatcatcaacccaaaagccggcaagcacgaccataccgtgcagtttatggagcgcatccgcgccgtgcatgccacgcacggggaagagccggaaatttatctcacacagcgcgcgggccatggcgaggagttggcgagagcggccgccgaaaagggcgatgcggtgcgcatttgggctgtcggtggcgacggcacggtgctggaggtcgtgcgcggtgcggagtttcacaaaaacgtcgccgtgggcgtatacccgtgcggcagcggcaacgacttcgtgcgctcattcggcaagcgcgaagtgtttttgaacccggaaaatcagctggcgggcaagactgtgtccatcgatatgatccgcacgcagcacggcgatgccgtgaacatctgctctgtgggttttgacgccaaggtggcggcggagatgaattattataagcacctgccgttcgtttcgggcgagcttgcgtataccatttcgcttgcaaagtgctttttggggcaccttgcggacaaaatgaccgtaacgttttactatgcggacggcacaaaagagaccgttacgggcgaatttctgttcacgcttgcgggcaacggtcgctggtatggcggcgggtactgcggcgcgccaaactcggtgatggacgacggtctgctcgattttgtgctgatccgaaagcccgcctattcccgcattccgggccttgtgccgaagtataagcgcggtgagcatttaagcaacccggcattttccgacctgctcgtttaccgccgcggcgtgaagatcgaaattcaaagcgaaaatgaagtcgtcagcaatatggatggcttgtgcatcaaggtgaaaagcgaggaatacaacattctgccgcacgcactgaatttcattttgccgcacggcgcggcattgccgaaggagccgaaaaatgcgcggtgatacactcggaaaagcggaaatcataacgccgcgcctgcgccttagacgcttttccatgcaggacatgagcggctttctgctgtttgccgccgatgcggataccatgctgcgggcgggctccaagccggtttctacaccggcggaggcggagagtgaattgaggcgcgccgcagacgacccgtatgcctttgccatcaccctgcgcgaaacgggagaagtgatgggcaaaatcaagtaccagcgcgattactgccgctataatacggacagtatttcgattggctacgagctttcgcgccgctaccgccataacggctacatgacggaagcgttgcgcgccatggtgcagaacgcgtttgaagtgatgaacgtcgaggtcgtcgccatcagccactttgtgggcaacgagccgtcaagaaaggtcattgagcgcgcgggattcatctttgagggcgttatgccgtgcggctttaagcggtttgacggcgaaatttttgacaatgtgtgttactccatcctgcgttcggagtacgatacggggctcatttcgtccgtgcgacgcatgcggtaaagcttacaaatcaatgtgcatgcccatattccgtcagaaaattgtggaaataccgcttttttctattgccaatgtacaaaagcagtgctaaaattgaataaactcaaaaactgtgactttgttgtgtcttgcaccggcaaagtctgttttttaacgcgaaagaaaggaaggaataaagatggaacagtcttttccgaagcgcccgttccgcacgcacggcggcgcgcatgtgccgcaccacaagaacacggcgcataccgaaacgcacgtgatgccgccgcccgatgagatcacgctgcccatgacgcagcacatcggcgcaccgtgtgtgccctgtgtgaaaaagggcgaccacgtgtatgtcggcaccaaggtcgcggacagcgacgcatacgtttccgtgccgatccattcctcggtttccggcaccgtgaaggagatcaaaaaagtcattatgcccggcgggcaggcggtagacgccgtcatcatcacgtcggacgggttaatggagcacgaccctgcggtatgtcccccgccggagatcaaaacgaagcagcagttggccgatgcggcgcgcgcttcgggtctcgtcggtctcggcggcgcaggctttccggcgcacgtgaaattaaacgtccccccggacaaaaaaatcgatacgctcatcgtcaacgttgcggagtgtgagccctatattacctccgaccaccgcgaggcgctcgaaaacggaaaaaacgtgcttgccggtatttataagatcaaagagattttagacgtgcaccgcgtcatcatcgcgattgaagacaacaagcccgacgccatcgaagcgctgacgcgcattgcggatgacacgaaaatggacccgaacgacgaagtgcgcgtgttaaagttgcatgcaagctacccgcagggcgcggaaaaggtgctggtgcaggcggcaacgggcagaaaagtcccggcgggcggtctgccggcagacgtgggttgccttgtcatgaacatcggctccgtctcgttccttgcaagctacatgcgcaccggcatgccgctgacgatgaagcgcgtcacggtggacggcagcgccgtgcagaacccgcagaatgtcattgtgcccattggcacaaaaattcgcgaggtcatggaattctgcggcggctataaggaagaaccgcagaagctcatcatgggcggcccgatgatgggcgtcgccgtgacaaccgacgagctgccggtcttaaagcagaataacgggttactcgcgttcggtgcggaagaagcacatctgttggagccgaccgattgcatccgctgcggccgctgcgttgcggcatgtcccatgaaccttgtgcccgcaaagcttgaaaaatacgcggagcgcaaggatgtggaaatgctgaaaaaacttgacatcatgacgtgcatggaatgcggctgctgcgcattctcctgtccggcgaaacgccgcatcgtgcaggccattcgcctcggcaaatactatgtaaagaaggaggcggctaaaaagtgaacaaattcatcgtttcctcctcgccgcactttcagtcgaaagacaccacccagactttgatgctggacgtcattttggcgctgaccccggcgatgattgcgtccgtcatcattttcggcttccgcgcggcggttattatcctgacaacggttgcgtcctgcattttgagcgaatacatatcccgccgcgtcatgaagcgccgccagacggtcggtgacctttcctgcgttgtgacgggcgttttgctcgcgatgaacctgcccgtttccatcagcccgatcattgcggcgttcggcggcgtcattgccattgttgtcgtaaagcaaatgttcggcggcatcggacagaacttcgtgaaccccgcgctgacggcgcgtatcattctgatgaactcgttcccggcgaaaatgaccgcgtggacggcgccgatggaccacagcttctccgacgccatgacgaccgcaacgccgctcggcgttctctccgagggcacgggtgcggcgctgccgagctacctcgatatgtttctcggcaacacgggcggctgcctcggcgagacctgtgcactcgcactcattctcggcggcatttaccttgttgcacgccgcgttatcagcccggttatcccggtcacgtaccttgcaacggcagcggcgctttccgcactgctcggccgcgacccgctgatggatattctttccggcggcctcttgctcggcgcgatttttatggcgaccgattacaccacaagccccatcaacttcagcgcacgcgtcatctatgccgttggctgcggcgtgctgacgattttaatccgccagttcgcgtctctgccggagggcgtatcgtactccatcgtactgatgaatattttagtgccgctcattgagcgcgttgcgaagccgcagacgttcggcaaaatgaaggcaaagaaagcgggtgacacaaaatgaagatcaccgcgaaagatattttaaaaccggcgctcattctgtttgttatctgccttgtcgtcacggcgcttctggcgggcacaaacctgctgacgaaagataagatcgccgagcagtccgcactggaagcggagcagtcgagaaaagtcgttttgagcgacgcggacagctttgaagaagcggacggctattacatcggcaaagcgaataacgaaacggtcggctacgttttccagacggaggcgaagggttacggcggtgcggtgaaggttatgaccggcatcagcgccgacgggcagatcaccggcgttgtcattttggagcacagcgaaacaccgggtcttggcgcgaacgcggaaaaggcttcctttacggatcagtttaagcagactgcgccggaaaagggcatcacgcttgtgaagaataaggcgccgtcggacggcgagatcgaagccatgaccggcgcgtccatcacgagccgcgcggtgacaaacgccgtcaacgaagccatcacaaagtacaacacggtaaaggagggcgcataacatggcaaaaagcctcaaagaagaatttacaaaaggcattatcaaagagaaccccgtgctgcgcctgatgctcggcacctgcgcgacgctcgccgtcacaacggcagcctcgaacgccatcggcatgggccttgcgacgacattcgtactcgtatgttccaacgccgttatttctcttctcaaaaaaatcatcccggataaagtccgcatcccggcgtacatcaccattgttgcgggttttgttaccattgtgcagctgctcatcaaggcctacgtgccggcgcttaacaagtcgctcggcgtgttcctgccgctcatcgttgtcaactgcatcattttgggccgtgcggaaatgttcgccagcaaaaatcccgtgctgccgagcatcgtagacggtcttggaatgggcgtgggcttcaccgccgcgctgctcgccatgggcatcatccgtgaattgctcggcgcgggtaccgtgttcggcattccgctcctctcgaatttcatggatcccatcatcattttcctgctcccgccgggcggcttcttcgtgttcggtattctcatcgccattgcgggcaagctttccgcggagggcaaagcgccggagaccatgggctgcgctgcatgcccgttggcggcttcctgctccaaggtacaggaaaaatgtgaaaaggagggcggcaaagcatgagtcttaaatttttagtcggcattttccttgccgcaatcctcacggagaactatattctcaataagtttctcggcatctgtccgttcctcggcgtttccaaaaagctcaatacggcgttcggcatgagctgcgccgtaacggttgtcatggttatcgcgacggcggtcacatggccggtgtatacgtatgtacttgtcccgctgaacctcgattatttgcagaccgtggtgttcatcctcatcatcgcggcgctcgtgcagcttttggagaccgtgatgcacaagtatatgccgccgttgtataacgcgctcggcatttacctgccgctcatcacgacgaactgcgccgtgctgggcgtgacgatgctcgtgctcgaaaaaggcgcggaaaacccgagcttcggctatttggcatcgcttgtcaacgcgttcggcgcaggcatcggcttcatggttgcaatggtcattttcgccggtgtgcgtgagcgtctcgagctgtgcgacgtgccgaatttcctcaaaggtctgccgatcacgctgatcgccgcgtcgcttgtggcggtttcgttcctcggctttaacggcattatagaccgtctgctcgcctgagcaaaacgaaaggggtttctatatggataaaattttgatcccggttctgatcgtcgcgggcatcggtcttctggcgggtattattctggcggtcgcctccgccatcatggccgtgccgaaggacgagaaagcggaagcgattttagaggtgcttccgggcgcgaactgcggcgcgtgcggtttttccggctgctccggctatgcggcggcgctctctaagggcgaagcgcagcccgggctgtgttctcccggcggcgaagcgtgcgccaaagcgtgcgcagagctgcttggcacgggcgacgttgccgtcgagaagaagacggcgcttgtccactgcatgggcagctatgactgcaccagcgacaaaatgcgctacgacggcatcgatagctgtgccgcatctaccctgctcgccggcggtatctccagctgccgctacggctgtatgggcatgggcgactgcgccgccgtgtgcgaatacggcgcaatcaacgtctgcaacggcatggcgtcaatcgaccccgcaaagtgccgcggctgcgcaaaatgcaccgctgcatgtccgaaggggctcatcagctttgtgccgctgaaaaagcaggcggtcgtgcgctgctccaactgtgataagggcgcagagacgatgaaggtttgcaaggtgggctgtatcggctgcggcaagtgcatgaaggcgtgcgaagtgggcgccgtaaaggtaacgaacttctgcgcgaaggttgaccccgcaaagtgcatcggctgcggcaaatgtgccgaggtctgcccgagacacgtcatcaccatgctggacgcgtaatttttaaaacaaaccgagcctcggctgtgaacagcaccccatttgttagacagtatgatataatgtttaacaggtggggtgattttaatgccaaagggagtaccaaacaaacgatacacgccggaattcaagaagctggtcgtggaaaccatgatgaaagaaaagatgagttacagagaaacggctcgacaatttgaaatcagcaatcatcacagagtacaagactg

SEQ ID NO: 21 - DNA, 257298 bp, Intestinicoccus colisanans
  source 1..257298: mol_type = genomic DNA
cgcgtgttgcttttgtactgccggatcaggaattccttttccaacggattcaagtgtttagacataaagacgagctcctttccggtagaatactcacctttatgatactccacggacaggcttttttctacccttccgtgtctacttttataatagcatcaatcctcgtatcacttgccaacgagggaattcttgaagcgcccggatatgccaatcagattttcgggtgatagtgcgaaagtatattgaacagcagaattctatcaagtagactttcggaatgtgattcatattgtttcttttgaatgctttaagatgtcctttcttgcaccaattattgattgacgttgtgccgtagccgattacttttgaaatttcgcttgtggtcagcacatcgggatattgtgcaaaaagctccgtgtaatacagcttcatattttcaagaatctgttcgggtagttcggttttcattttcacggtatagttccccttgtaccacccagccggtgctgaataggattcgggaaatacttttctcttttcaagatatgtaataacatcagcctttttgattttgtaacagcgagttttcttgcgcgtgtattcgcacggaatctttccgcttcgaagcagatacaaggccgttgatttactgatgtggcagatttgatagagttggtctttggtaataatatcgggaatcgaatcccagttgattgcggtttcattcatagcaatacacctcgtaaatattttagtcggtgcggttctttcctgtgtattgccgttgttgatgtgtttattctgttctttccgcagttctttccaaaatagtgcctgttctttccaaaaacagcgaaactgccgttattcgaactttccttatttctcgggatttctgcggtgcaaccgccaaaaaagccttaaatatcaagcttttcggcaaatactaagtcgcccgaaaccgccttcaaaaatcgctaaacagccattaatccataaaactcgaaatgctgtagaccgaaaggtctctagggttcgaatccctaactctccgccacaaaaagcctgtaaacaagcccgtttacaggctttttaatttttgcctaaagggcaaagcccgcacgattttcggttttcaggggagaaaatcagctgttctccccggcactgatcgaactccagcggctgctgaagtcgccgccctccggtagcgcaagccctgtctccatcgcctgtgccgaggtgatcttggacttgtaatccaagtgggcgtagatgttcgccgtggtggtaaagtcgctgtgccccaaccactcctgaatgtgtttgagggggacgccgttggccagcagcaagctggcacagctgtgacgcagatcgtgaaagcgcatccggcgcaaaccgtgactctccagaaatttcggaaatgcgttggtcaggtattccacccgcatccgctcgcccaactcatccacgaatacaaagccatcgtattcatagttgtagcagttgccgcagacctgcttgttcagctcctgcgcctctttcacctgcataaagtattcccggaagctgccgatgagcggcagggtgcgcagactggacttggtcttggcggattgctgctcgaactcctgatacttgccgtcgatgatcgttgaggtcacggtacgctttacggaaatggtgccctgctcaaagtcgatggcatcccatttcaagcccaccacctcgccacggcgaaggccgtaaaaggcggccaccagcaccggcagctccagcttggttccccgaagggcttcaaacatcttctgcatctcgtccgccgagagaaagaccggctgaaagctgttctttctgggccggtccaccttgtccgccacattctggatcagcatatcggtcttgactgcatatttcagtgccgagtgaatgacggcgtgataatggataacggtattgggcgtgacccgcctgagcatttcagaataaaacatctgcaaatgtcgggcttccagttcccgcagtgtcaatttcttcttgcgaaaataagggacgatggtgcttttcagcagtccttgataggcaccgtaggttgcgtgggccagccttcccttggcgatctccagccattccagcagatagtcggcgaacagcatatcactgctcaggtcgcccacttctttgggcggctcaaattccgctcggagccttgccagttctgactcggctttgcgcttatttcccttttcggaaagccccagcgagatccatttcgtttttcgctgccctccggcgtttttgtagttcaacacggcataatacttgccgtttttcaaagtcagatgtcctgctaccaatttcatttcctcctgtcctttgtatttacagaacagaactccaaaccgacagcatcagtataccatcggtttggggttctctctattctgcgaattgtttgattgcagccgtatcggtacgaatcagcgggcgtcccggttccgttctctctgccgtttcagcagttccagacccttgatgatgtcccggcgcatctgctcctcggtgtagccggagggaaaatacttccgcagctcctcccgcttgaatttcagttgctcctgctggttgggtttcgtctccgccagcacggcgtagactatctggtcatccagcaagccctcctgcgccagctttttcaggcggatgctctgggcgtgggacggggtgcagtcgttcagcgccatcgcgtccagcaccgcccgctgctgatacgagtctaagtaggaaagctccaccgctgggttgaaggcgatcttgccgtcgtccaccatcgaaagcagctcgggaatcaggtaggtcaggcggatatatcttcgcacttggtctttactctcacctgcatcgtctgccactttttctacgctaagcaacttctctgcaacttgcacagaagcgatgccctgatgcttgatggcatccagcttcatcttgtaggcgaacgccttttcgctgggcaggatagtctctcgctgcaagttggcatccaccattgcgatcaccgcttcatcgtcggacagctcccggacgatgacgggcatcgtctcgacgcccagcacctgacacgctgccagccgccggtggccggagatcagctcatagccgccgtccggcagcggccttgccagcaccggggtaatggctcccaccttgcggatgctttcgatcatccgctgcatctcctcgttgttctgcaccttgaaggggtgacccttgaacgggtgcagctcggccagtggaatattccgcacccgctccagcttggcatcgtcccgctccgcctgcgtggagaacagatcgtccagcgtgggtaaagtaaaatccgattttctcattgtgttgtcctcactttcatagttttttctttcggggtcttagggcacgccctaacgagtgtttttacgctccggccctgccgggagtaaaaaagcactgctcgctaagatgacgcaggcatcgcaagcggatacactgtttggctccgacaggagtaaaaacagtctgctcgcttagactgcgcaggcgtaattctcgcttactttaattcattcaaaattgcttccagtctgctcagaatttcctctttctgaagctgtggaagctccgctttcaggccgttcagaatccgaaacaggcggtaatcccgctccgtgatggccgctttgacctctttcccaagccccagccgccgcaagtattccgacagcgacagagaacagaaccgggcattttccagcagcttctgcttctcctgctcggtcacacggacattgatcccgtagtttttgctgcgcatttgttcaccccctttcttcggtttgtgacggcaatgacggttgtgacggggatttccttatatagcgatcccggcgtcatttgcgtcatcgccgtcacggcgcagaaatttgatgagccggcttttgccggtgcgcttggtgcgatactcgatgcccaacggctccagcacctcataggcgaactgaccgagatactttgtgaccatattgggcgtgacctcctgctccttcatttcggtcagcaactccgtggccgtgcctacccattcggtgcggcactccataaagtccaccacccgaaacagaaatttcggcagctctgccttatgaatatcctcgctgttcctgcgctccaccagctcccagacaaggtcgttaaactgcaaggtcagttcctgatattccacatcccgcccactgaccagcagcgtagcagcgtttccactgcgcttacggcgcaggatgaagttggtgtccgcagcaccgatgataccggtggagccgctgacatcgttaaagggatcgtcgctgtcttgcagctttcgcaggtgatgcaccagcaaaatggcgatgttgaagccgtcggcaatgcgcttgatggaggaaatgtcatcgtaatcgttgccgtacatccccgattttccggcgctgcccttggagtcccgcaccttttgcagcgtgtcgatgatgaccagcttggtggcgggatgctcggtcaggaaatccgtgatctgctcctccagcccgccgccgatcagcccggaggtcacggcaaaatacaggttgtccggggcgctgtcggtgaggttgtagaggcggtccttgatgcggcgctgggtgtcctcaaggcttagatagagcacatcgcattgcagtgtggacagaccccaaatggaatttccctgcgccacctgcagccccagccacagcatcagccagcttttgccgatcttgctggcaccgctgatgacattgacgccctgtgaaatgagtccgtccaagatgaacatcgtcttgctcatcggcgtggacagcagggtctctgcgtccacagttttcagtttgttgtccatagaattctcctttgtagaatgttagaaatggattttgacaggtgcagatggaaacggccacccgcacccgctttgccctcaaaaaagccccggaaatcaaggctttctcggcgcttaatgttcgacgctgcgccgccgtctggcagagtccgccttctgcttgcgccggatggagcggccgcattccgggcagtacttctgccggttgctgccgggagcaaagggccttccgcatcggtcgcagagccgtgtgcgctgccggtaaatgtcggcgtagagtgccttgtcggcgggcagaaccgcccgccgaaagtacttgcacagcagcgaataagaaatcatctgcacgcacacgcagccctcgccgtcgtccagcggcaggcagttgccgccatcgtagttggcgcacagccgccggatcaatcggttgcagcgtgccctttgggcgggtgtcaggcgtttgatctcatccaaccttcttcacctctttctccattacatagttgatgacgctgattttcgggatcttcagcgtcgtgccgatcttcacggcgtggatgtacccatagtcgaccagcttgtaggccagcttgcggctgatgcccagcatctcccgaagctctttaacggtcacgatgtccgggtattccggaaacatcatctgataaagctctctgagctctcctttcttcataggtttgaacctcctttgcttgttctgaaaccgcatttctgcggtaatttttgcttgctgccgctcatctgtatcgttcctgccccggagtctcaccacggcgtatcgcttctttggcgcgctctcgtcgcagcaagttccatatcattcgcttccgcactcgtgcgaaagctcattcgtttcactgctgctcctcttcccacaaaatcttcgattttgcgggagccctgaattatcgggaagtcgtggcgtcacttgccggaagcatatcctttggaggcggcgattcaattttcaaggtacacagggagacagtcccctcaataggtagccagcgagaaaggcattttatagaccccctcactaatcaactgggaaaaatttttcgatttgtacgaaggaattttgaaaaaattctttgaaagtctctctactaaccaactgggaaaatttttcggatttgaacgaaaaaacttttgagaatttttctgcgaacccctctactacttaattgggaatttttccggcaaaaataaaaagaattttgaagaaaatttttaagcgcccctcccactaatcaactgggaacttttctggcaaataacaaataggattttgaaggaaatttttcagggccttcctactaatcaattgggaaattttttgagattttggcaaagtaatttgaaaaatcctctcaacttttcaaaagtccttctacttactctgaataaggggtgccatttggcagggtacttttcaaaattccccgcaaaaatatttctcccttcacttactctgaataaggggtgccgtttgtgggggtgttttcgagaaatttctcaaatatttttctatcaagacgcaaaaaagccgccctcccgatgatgggaggacggctgacaatcactattgacttatagatggctcctataggaatagggcaccggccaagcggtcgatgccctatttctacatacattactgaacaatatgctgtttagaatttccattgttccatttcacacaaagaagtaatgtttacggatgtaatcccatacttcttactaatctgcggaatcttcatttgtttgtctttgttttcttcggtgataattattaatccgtatttcatagccgttgcaattagaaatgcgtcgccagaagatgtaccgcttttccctgtaaattcaatcatcttcggattttcagtgacgatttttctaacattgttttggatgtcgtcgtcaatttcaaggacagtacattgttgggaaaaaatccactctttaatttctttatcctttatttcttcgaatatctcagagcaagttactatcgaatgggaacgcatatattcttcgattcgttcccactgacttttataaacaagccgtgtatgagtttcccctggtttctgagacagtatagacgatgtgtccattatgtacttataaggtctttcgctatcgaatagtgtcatctgttccacttggatacctcccgcaaaaacttgtctatatggttttggcctacattcaaatggcgggcaatatcaagtttgctatacacatcgttcacatacccctgatataaaatcttgcttacagaaggacttgtacggtcgattgcttctctactcatattccgcggaatagaggattttattccattttccctctgaatttttctcttttcccgatcttcttcgatttctctcctaaacaaatctgcataagtttcatattcgctttggtcaatcttacgaagttcaagtaatctgcgcactattacttctcgacttacagaaaagcgatccgcaactcgcttaatatcatcaattgaatatggcgcaaaatagtgaccgtgttcaagtacaattctaagagctctcttgggaacaagtaattcgcccgctacagcattgcaaaacacttcttctgacaaagtcgatgcggaactgctcatatcattgcacaaggaggattcccttttgaataggtgaactagttcgtgaataattgtaaatgtctttgccggcggacgatcttcatcattaatgccgataataggcaatagcgtattataaatcgaaaagcctcgagctgtatcaatcgttacatccgtgaagcaatgcacaaaaacgccttttgtctcgattttatcacgaacatataggtaaaattggcgtgtagaactacacttatactgttcaccaagatcgatagcgaattgtttacggatcgcatttgcccattcatcaacagaatcgctgtcaggaataagcggctcaaaatctggtggagttattccaaattcatcgtcggcacttaacagaaaatcgcgttcaagaagaacatctatcatagcgatatttaatgagctgtcatcaatactaactgccccagacatcgttcgcatattccgaatatttggaatatgcttcaatggtatatcgcaaggattcatatagagacctgcaaagggtatatgcaaacaggctgcaattttcttcgcttggttgatggttggcaagtttatatcagtaggagtaagccactgatttagcctagacatatttaattttgtcttactggcgaggaattcactagatacgcccttttctttgcagatatgagccaaagtatctttattaatagtcgcatatacatagcccactatatttcacctccacataagcaatcaattttagcccatcctcatctcccgatacactacatcagccaatgcgctcattatggcattatacttgtgctgatcctcaaagagcgaggtgtaggtatcctgcgattccagatagctgtcctgagccgctgctccgaaggccttggggaaaatactttccacaaaaatctgcggatctgaggtctgcgccatcttggtcagcttcttgtcggccatcagacggctgcgcagagctgtcagcagcactttgtctccctcggtgaattcacccttgtacttttcgttgatcttggcgatgatctcatccagcggcgactttgtgcccagtcccattgcgcccttttgcttggccggttcgtacacacccttcacctgttccagctcaatgcttccggcgaaggtcttttgcagcttgtagtattccagcttcaacttaccctcaaggtccaccatatccgtggtttctgcaggcagcaaattgatcagataacaacagaatacatattccttgtgcagctccttatcgaacatccgcaggatctgcgaaatatagccgtaccacttaatgagattgcgcatctgacggcggaactgataccgctcgttgggcgttttttgattataacggtctgccaccggcttcaacacactggtcattcgccccatcgcccgggcatcctgccggcctgtgctgaaatactccttggcaaaagcctcaatatctgcatcgttatagaccgcaaatccccgcagttccttctgcgtctgatagatcaggtcagcgttgacctcctgcgaaagcgaggtttcctgataaaacggctgaaatgcctccagaatgtcctctttcttgttggcaaagtcgagaacgaaagtatccaccttgccggtgcaggtgcgattcaatctggacagcgtctgcacagtcttgacacccttcagcttcttgtccacgatcatcgtgtgcagcagcggctcgtcaaagccggtttggtacttctcggcaacgatcagcacattgaaatggtcgtggaattccgccttggtctgcgtttcggcgatgtgcgtcccatccgcacgaacattcagcttcggctcggtatactcctcatcaccgtcctgcacagcacccgaaaaggccaccagcacctgcacatcgttgtacttctgctcctctatgtagcgcttaacctcgtggtagtagcgcactgccgcaaggcgggacgaggtgatgaccatcattttacccctgccgccgatcttgtttcgggtggtttcccggaaggtctccacgatgatctgtgccttttgggagatgttatacggatgcagctcctgatatttgcggatcaccttagctgcacggctggcgggcacatccggattatcttccgaggttttgacgattttgaagcaggtgtcataggtcatatagttctggagcacatccagaataaagccttcctcaatggcctgccgcatactgtaaatgtggaacggatgaaagctgccgtcctcatattccgtgccgaacaattccagcgtcttgtccttgggcgttgcggtaaaggcaaagaaggataggttcttatgccgcccctgaacggtcatttcccgcatcaggcggtcgtccgggtccagttcttcttcggccttgccctcaatctcggcgtattcccgcagagcatcctccgtatctgcgagggcggctttcagtttcagagccgagctgccggtttgggaagaatgggcctcgtctacgataatcgcaaagttccgccccactactttatccacttcctgatagatgaccgggaacttctgcaaggtggtgacgataatgcgcacgccgccgttgatggcgtcccgcaggtccttggaggtcttatcttccccgatggtctcaatagcgccgagggtgtggtcaaagccggaaatggtctcttgcagctgcgcatccagcacggtgcggtcggtaacgacgaccacgctggagaacaccggcttgttctcctcattgaacagcgaggccagccggtaagccgtccacgcaatggaattggacttgccgcttccggcgctgtgctggatcaggtaattatgcccggctccgttctgcctgacatcggccagcagcttgcgcaccacatccagctgatgatagcgcggaaaaatcagcgttttgccgtccttcaggttcataaacttctggacaatgtccatcatactgtccttctgaaagacattctcccacagatacgctgtcgggtagccatttgggtttgccggattgcccttgccgccgtcgtttccggctccgttggagccctggttaaagggcaggaaataggtgttctttccggcgagctttgtggtcatccacacctcggtgtgatccacgcagaaataggccagaatgcgcttgttgaactggaagcaaagctccctcgggtcacggtcatacatccactgccgcttggcgtcgtccaccgtttggccggtgtactggttttttaattcaaaagcgaacaccgggatgccgttgagcaccagcaccatatccacgctcttttttgtatcggcggagaagtaccactggcgatagcactcgatggtgtttgccgcccactgggcagccgccgcctgattcagggcagactccggcttaaaatagcacacccgaaaacgcagtccacggtgcttgaagccgtggcgcaggacagagagcagtccctccgtctcgcaagccgtgttgaacgccgtgcagaacttccgcaccgggtccacctgattggcgttttcaaatcgcgcccactccttgggctgggtgcgctggacaaagtcgatcagggtattcacatagagtccctgtttggcgtcataggtgtctgcacccttggtatatccgcccgccggggagagaaagaaggattctatatccgcttcaaaacgcttttcggtggtaatcatttgaatttcctcgctttcccttttcgtgaattctcggattccacgcatgctccaatgttcagcatatttccatccaatgtcatcagatagcaatactcatcaccataaatgtcctcaacaaacattttccacccgcgcatcgtttcagttttatcgaccggaaaaatgttcaagccggttacacagtccttgtcgataacattgccttctgttggaatatatgtatggttatccgtggtcactttcttgacaacagcgatgccgttgtcgctgtttttaacataacactgtagcgcataatcacaactgtcgccatctgctgattttaataacaactgcggaatgctgtcccacgcaggtgctcgcacggggtgctctgcaaacaaataaggctttgcctcctgaattcggatacggtcactttcaattctttgggctttcaatgtccgttgcacgccccacattgttagaccgccgccaatgagtgcgcatataatcgggattatcacatcagtcagccaacacacttgttttgacctcctttttgcccgtcacatactcataaatcagagatttcttgtagttttcaatttcggtgaggtattgctgtttcttggctattagtgcatcaatctcatcacaccgaacatccaaaaacgctgcaatgcacttctgctcagcaagcggtggggcgcaggttttgatggcaccaaagtcactctctgtaagcgaactccgaagattttttgacaaatgcacaaaaactttgttatcatctatcattcttaaaagatagtcataatacgcattatagtagccgtcatgcataacaaagcgactatacgcaggactagtaacaccgtagtctctaaccacaccaacacatcttggtgttacatctatatcaaaaaggcaaagcaacaaatcatttggttcaacatattgatagccatcaaatgatgttggcatttttccgccagcagtaaggtcccgtttaacgacaccattcacggtaagagatataacatcttccccattatactgctcacagatttctttaaccttatgcattatgcgcttatgtggagctaccccccattccgccggaatttcccctatccattcaatgccgctgtccttcatcggcctgttgccacggatgcccttggtgacagcctgcgtaatgaccgcctgtttcagctttttgtattcttcaatggatgcacgggtcttttccaatacagcgtcaatttcggagcaccccgcatccaaaaacgccgcaatgcgctcctgctcggcaagcgggggaacacaggtttttatagccccaaaatcattctccgtaagcgaactacgaagattttttgacagatgtacaaaaaccttgtcatcgtctatcgctctcaagagataatcgtaataggcattgtagtagccatcgtgtataacaaagcgactgtatgctggactcgtaacgccgtagtcttttactacaccaacgcatcttggcgttacatctatatcaaaaaggcaaagtaacaagtcatttggttttacatattgatatccatcaaacgatgttggcattttccctccggcagtaaggtctcgcttaataacgccattcattgtaagcgagataatatcttctccattatattgctcgcaaatttcttttactttgtgcatcacccgtttgtgtggaactacatcccagtttgttggtatttgtccaatccactcaataccgctgtctttcatttcacgcattgacgctcacctcaacaatctgagcgacagcaaaaaatgcatagcacaacacgggggtcgtcatattgcggatgatagggttagcttttcccttgataaaccagaaattaatagccaataaaacagccgtcactccgacaacgatccataccgatacgatattgataatcgcagggagggaagtatgtatcaaagtcaaaagtgcagaaatagaaaccccaagcccaaaactgttccatatttccacaaacttgctatctgcctcaaccttgctttcatctgccgccggcgtgtatattttcatacaacgcagctctccgaaaatgtaataaaggatattcaaaattgccgctgtaagcgccgaaaggaatccacaatataagggcaaaacagttttttccgtcgttgcataggcgacaaacagtgctgcccacagtgctacggcgacatacagaattttataaaccagcttcagccgcttttcccgcaactcaaactcagccttaatgtcatctatccgattttctttctccaacacttttagccctccttatggaacagcgcgttcaggctgtcggcaatttcacgctccagcttttgaatccgctccacaatgtcgtccaccggctccggcggctgatactcgtagaaatagcgggtcatcggaatttcatagcccaccttagtcttgctcttgtcgatccacgcatccggggcgtagggcaggacctcccgggcaaaataagcgtcaatatcctgcaccagcggtacattttcggtgtcccgcagggcggtgtccgccaccggcttgccccgcttcatcacgatctcgccgttttcgtcccgctgcggacgctccactacgattttgttgtagccgaactcctcactgccgaagatcttgctctcacagtacacgccggacttgtccccatacacggcattgttccggtattcgccgtaggcctgcacgatcagctcccggcaatggtcgctgatgtccttgcgcttggtgccgatggctttgcggcgctgttcgtagcagtgggaagcgtcaatgagctgcaccttgccgcagcggtaggtgggcttgtccttgcacagcacccagatataggtggagatgccggtgttcataaactggtcggtggaaagctggacaatggcgtccagccaatcgttttccaagatatactggcggatgttgctggggccgctcccggcatcaccggcaaacagcggcgagccgttctggatgatcgccattttgccgcccggcgccagcttagacaggccgttgagcacaaaaagctgctgcccgtcgctgattttcggcagaccgggcgcaaagcgccccagctcgcccttggcggcttcggcctccaccgccttctgttcccgcttccagtcgatgccgaagggcggattggaaatgcagtaccggaaggtgaagcccgggaactgatcgtcggagagcgtgtcaccgaaccgcatattattggggtcgccgccacggatcatcatatccgcctttgcaatggcgaaggtggaggggttaaactcctgcccgaagcaggtcacctccacatcgctgttcagctcgtggatgcgctcctccatacaggaaagcatctgcgaggttcccattgtcatatcgtatacggtcacattgccgtcatccagcttggcatcacacagcagcaggtcggtcatcagatagatgatgtcccggctggtgaagtgcgctccggcctcctcgccaaaggactcggaaaagcgcttgacgagatcctcaaagatatagccgcagtccacggcgctgattttatccgggccgaggtagcccttgggggagttgaactccttgatgaccagatacaggctgttgcactccaccatacggcgaatgatgttgtcaaaatcgaacttggccagcacatcctgcacattgccggagaacccggccagatagtcccggaaatttgcttcgatgttgtccggatcggccagcaggctctcaaaagtaaaccggctggtgttatagaactgatagccggaggcacgggtcagaaagccgtcgataaccgccagcttcttaaccttttcatattgctcgatcaccgcatcgtgggtgggcagcaggcagtcgtgaaaccgcttgaccaccgtcatcgacaggatcacaaggccatattcgtggggcttgaacggcccgcgaagcacatccgccacattccagatcatcgtggccttttcctgtatatttacgcccacggcactgcttttttcgttaaccattgctttctctcctcatccgaccgccacttcgacctttttaccgctgaaagccacgccatatttataaattgtcctgaccccggctgtcgtcagctcggtctcgtatttcttgtcgttgatctgccgcaaggccgtttcggacagctttttcagcttttcgtcgctgcaatttttctccgctttcagctcgatcaggatacccggaagacccttttgcgtgggcttcagctgaatgtcatagcgcccgtcgccggattcccggttggaggtcacgaaagcgccgcccagcagggcgcacaggcccagcataaagccgtggtagaagttctccccggcggtatcgaaggagctgactgactgggtcagcagcgtctgtatctgcgctttcagccgtgcgttatcgccggagaagatggcctcctggacggaaatcgccgtggacggcgggatcagattctccaaccgctgcaaaatctccttgttatacaccagagaaatctcccggttgggcagggaaacctcgcacataaaatcgccgctgaaggagggcgtggttttcagtgccttcagatagccggtcaccagcaggaagctgtaaatggtggagggattgcttttgatctgcggatagatcacgccggtgtcgatgaaggtggtgaaggtttcgccgttgaccagggaggtcagacggttataaatctcctcatctgcctgggcaagcacttccccgataatatcgttgctgccggtggagacccagaagggtctcggctcacactcgttactgaagtagttgaccaccgaccacgggttgaaaatctccgtcttgccgaagcggtagccgtcgtaccactggcaaatttcgtcgtacttatcggcagcgccgtaatattccgccatctccatcacctcgtcggcggtgaagccgaagtaggcgctgtatttgttgtccagcacggagttgatggacaggttgttcatcccgctgaagatgctctccttggccacccgcagaatgccggtgaggaatccgaaggacaggtgctgattatccttgaacccgccggaaaacaggtttcgcataaaccggatgaccttgtcgtaatagtccttctggtagccctgctggatgggggtgtcgtactcatcgatgatgataatgggcgcagtgccatagtgcttgtgcagcatagcggacaggtccagcagtgcagaagccaactctacctcgttgaccttgccgtctgccagcttttcataggtctttttgctgtactcgtcgcacttttcactggtcagcagctctttgtgccgccgggtctcctttgcgaaaatatcccggatggccgcaaaggtctcctcccaagtatcaaacttcacatccttgaaggtcaggaagatcacagggtacttgccctgataatcccggtacttctggccgcaggcccagatcttcttatcccggaagtagacggaggtatccttgtcgctcttttcaaaataagtgcgcagcatatccatattcagcgtcttgccgaagcgccgggggcgggtgaacagcgtcaccatcggacgctcgtcgatgaagtccttgatcatcatcgtcttgtcgatgtagtagtattccgacgatgcaaggcagtagttggacacgccgatgggcaggggcaacttcggcgcgcgctccgtcttgcggaaagcgcccgtcttgagccgctgatccgccggcttctgcgtatcagcggggatcagccaacgattgccctgctttttcgcaccggcaattctcccattcttgcagagcgtcgcaactctccgctccgttatattccagcgcactgctgcctctcttaccgagatcatttcagccataggggatacctccacgcataaaatcacaagtacattatacccgaataaaagaacaatgtcaacaaagttcggaacaatatcgtttcaaaacagcattgttctttttctgcacacaaaacaagcggaggtcatcgacccccgcttgctcgttacccatatacaatttcctgcatcacgacctcgtttgcccgatgtcggatgccgttcatcttccgcacccacgcctgcggatcattggcctttacctcctccgtcacgccctcggtgtctgcgtattgttttaccagccgaagaaagagttcctgcgcctgctcctcgatgtctgcgaggtgcccatccagcaccccggcggtcagcaggttataatacatcacccggtgatgttccttcagataggctcgccgccgttgaccgtaaatgccgataggccgttcttcttcgggcgataagcaaacgtccggcaagcaatagtccccctgccttgtgtaagtgccgcccagctgctcaaatagcgatttcatatgtgatcctcccactcaaaatttccccggcaggtctgcaacgcaaaatgcacccgcctttcggttacagtctatcaaaaccgaaaggcaggtgcgagtgtgcgaatttcagaatcgcaaggtcagtacgatattgtgacaggttataggctttaggccaaaatacgatgcacctgtattttggcccgaacggggcaattccgtacatctgcaacaggcccccactttgtatccacaaaaaatgcagcgaacttttgctgtgcgggcacactttttacaacgaactttgcaaatgcccttaaatcgttgcaaagatcacttccgcttcatcttcctgctgaactcgttcagcgtctggatatgccagaggcttttgcgggtaatggagcggaaggtcagggaacagaagaaatccacaagaaagattttcgggatgcagaatttcaatcccttctgaaaggctttcagcgaaccccggctgcaccagttgtggacggtggtcagggtatagccggtcagggccaccacatcctttaccgtgaccacgtccgggtatttgcgcagcagcttttcatagtagccgtgcatctgccggagggtgtcctcgggcagctccttagagagcctcgccacatagtgggtgccgtaccagcccttcggcgcagagtagagttcagggaaaatcgcccgttcctccaaatatgctttcacatcctcttttctgattttatagcaccgggttttcttacccgaccactcgcagggcaccttgccgcttttgagcaggtgcagcgccgtggacttgctgatgtggcagatgcggaaaaattgctccttgttcatcacctcgggaacactgtcccagttaacgggaaatacatccatttgtaacacctcaaaaatagattatcgtcggttggaagctctattctgcggtgtatggccgtctcccgttttttctctcctatcttcccgcatttctctccaaaatcgggaaaaatgccgatttgaacccactttcaaaaaagtctgtcccacaaggctttccgagcgaaaaagcctgatttcaagcggctttcggcgggtacggggcttacagaaacgaccccaaaacaggcatccccgtcacagttgcataaaagactcgaaatttttggaagctccggccgtttcgtccgctgaaaatgtccgccgcacagggctttgcgcgggttcggatttcacaatttcatatcgttcttgcgtgtttttcttgcattcttccggagcaaggattacacttgagatatacggagagttgtccgagaggtcgaaggtgcgacactcgaaatgccgcgtatgaaaaagcaaaaccagggacaggcagagtcacacagctcttacctgtccctgcttcctgttccggcgtcctgaaaccggcgtttgcgcaaattttgttgactattgagaacggaatctgtataatgaaagcaaaagtattctgagcaggaggatgaaatgcatggcgacgatcaaggatgttgctaggatagcgggcgtgtccgtgtcgaccgtctctcacgtggtcaacggaacccgatacgttagtcctgagaaagtccggaaggtcgaggacgctattcgccagctggacgagctcccgaatttcatcgcgaaacggagtgcattgaagagcaaactgtccgaaagccgctatgtgctgatcttgctgtcgaaaaaacgcagcctgtttcagaatcaagtcaaggaaaagctggaagaaatcgtagagcagaagggttatatcgccatttcgctggcgtatgacctcgatgaagaccgactggcggccatccgcgcactggcaggaacgctggatcttgcgggaatggtcgctttcccggaccgggaaggtgtgctttccggagcctttttcaaagggctccggtttccggtggttctgattgggaaccccgtggatcggtttgtcgcagacaccctgctgcccgacacctttgagggcagctaccgcgcggtgcggcacctgattaaaaacgggcatgagcgaatcgcttacctgtgcgagtcggaagtgtgcggcacccaaaggtttgaaggctacaggaaggctctggaggattccggcattgcgttggaaaaagtgctggtccgcgcgggcttgaaaaccgaggcgttggccgccgaagctatggcgcagatcgtcgcggcagagcctgcgcccaccgcggtcgtgattgccgactcgctgcctctgattcccgccatccggtatggaatcggccacaacatcgccgtgcccggtgacctctctgtcgtcagcctgaacgatccggaatgggcctcgctgacgacgccggagctcacttgcgtggataagcaaccacggcagtttgcgctttccgccgcagacctgctgttccggcggattgaccgcggcgaaattgcaaacctctcttcgcccgcgcatgcgtactgcacgaaaactctcccctcaatcctcaatgtgcgcaactccacctgcggaatcggccggggtcccttcggagaacgggcagcgggtgcgggcggccttgccttatccgaagtggaaaaggaaaagattcggcaaaagcagtatacggcggcgatctcattccactatacgggcaaggcgtggatgcgcctgcaggaaaagggtatcaaaaaagtcttcgatgagcttgggatttccatcatcgccgtcacagacgctcatttcaacgcggcgctgcaatgcaaacagttggaaagcatcaaatttctgaagccggatctcctaatctcgatccccgttgatactaggggtaccgcggaagccttccgctcgattgcggacagcgacacccggttggtgctgatcaccaacgtcccggagggactcaccccgaaggattacatctcctgtatctccgtaaatgagcgagcccacggggacagtatgggccgcgggttgggcgagtacatggtacggcacggcctgaaatatgcggggctgatttgccacggcgagcagaacttctttgccacaaagcaacgggacggcgcggcggaacaggttctgacggaggaatacccggaaatccgggtgtgcggaaaagtcaattttctgacagaggtggacgtctaccagaaaacactgaagctcatcgggatgtacccggagattcaggctctgtatgtttcttgggacggtcccgcgctggaggtgataaaggccctgacggagctggagcgcacggatatcgcgatcgtcacgggagatctggactatgccatcgccatgcagatggcacagggcggcatggtcaaaatgattagcgcgcagtgcccctatgaacagggggaagccatcgcaatggtggcggctaacggcctgctgggaaaagcggtcccctccttcatcggggtggagcccatcagcatcgaccgggagaacctgctgaaaaactggaaggcgatcttcaaggaggatccgccggcggcgttgcgcaacgcgatcaaccgcagcgccggcgcactttaacggcggttcgccgcgttcaaaccgaccgacagaatatcaagcggataagcatctggaagcagggcttatccgctttttacatagcgcccgcgcaagccgggttcccggaatttttcattgcccctatcccccgcgcggcttttcggccgcgttttttttgcgcggaaaagaaaatttgcgcaaatacacacgaaagaacaagaagtcaaggcatcttccaacgagcaactggcccagacagcctgacacaggtgtcaaagcattgcaagcgaaaagaaagcttgattggaaatgcctaattttgttccttgtatttggcgaaacaaacgaattttctcaaaattgcaagtagaaattgacaaccaccgcagtgcagagtattataatggaagtaaaattaatttgcgcaaatttataaaaacaagaaaggagcagacatgaaactcggttatatgacaaacgcgttcggccctctggtaggagaaggaggcggcgttacaagcattaaggacatccggtatctgaccctttgcgacgacgaagcggtgctgaaaaaaatcacaaatgcaggcttccggtatattgaggtgttggaagggaacctgaccaaatatggttcggacatccaagtgctcaaagacatgctggcccgctacggtgccggcatgatgagcgtctgcgtgggcgccaattttatctacccagacgcgctggaggacgagatgtttcacatggagacagtcgctgctctggcggaacaggtaggcgtttcctacgtggcgttctgcggcggtgccatacgcgggaaaggcgtccagacgggcgactatgcgcttctggccaaagggctgaaggaggcagaaaaggtcttcgccgcccacggcatcgaggcaagctaccacccgcacctcgggtccatggcggaaaagccggagcaaatcgaccgactcttttcggtgagcgacatcaagatctgcccggatctggcgcatctggctgccggcggcggagatcctctggagatcgtcaaaaagtactacgacagaatctccttcgtccacctgaaggatttagacgaaaacggatttgccccgctgggcactgggcacgtcgatgtcgaaggggttctgcggttcctgaaggaaaagggatatgcaggagattatctggtggaggctgacggctttgccggcgacccagaagaagcctgccggacatcgtaccgtttcctgcaaggcaagctgatctaaaattcctcccgtccgcggcatcggtcaacggcgcgcggcgcgggagggcatcttagaatgggaggattttacaatgaaaaaactgaatgtgggcctggttggtgccgggttcatgggaaaagcgcactcaatcgggtattccgacatgcccaagtatttctggccggccccggccgtgccggttttaaaaacaatctgcgacatcgtcccggaaatcgcagcggacgcgaaagaacgcttcggctttgaaaaatgctgcacggactggcgcgacatcgtcaacgatcccgagatcgacgtggtaagcatctgcacgccgaacaacgtccacgccgaaatcgccatcgctgcgctgaacgcagggaagcacgtactctgcgaaaagccgatcgcctcaacattggaggacgcgaaggccatggcggaggccgcaaagaaagcggcgcaaaaggggatcattgccatgaacgcctaccagtacaggcgtgttccggcgatcgacctcgccaagaaattcatcgatgagggatccatcggcaaaattctcaacgtgcggtgcacctatctgcaaagctggtcggccgatcctgcctccccgctctcctggcggttccagaaagacatcgccggcgcggggacgcttggcgacatcgcctcgcacgtgatcgacatcgcccagtatctggcgggtgacatcgaggcggtaaccggcatgatgcagacctacatcaccgagcggccggtgcaggaaggcggcacagacctgctgggcaccgtaaagctcggagccgacgcgaagcgaaaggccgtagacgtggatgatgaggacagcttcctcgtgaagtttaaaaacggcgcagtaggcagcatcgaggccacaagaaacgcctggggtcgcaacaacttcatcacggtagagcttcacggcactctgggcagtctctacttcaactacgagcgactcaacgagttgcaggtgtgtttggccggcgaccccgacgacagaaggggctttaagacaatctacaccggccccgcgcattttcacggggaagtgacctggaacattcccggaatgaacattgggtacggcgaattgaaatccatcgaatcctacgagtttatcaaagcggtggtagaaggcaagcagccgtctaccagcttcgcagaagggtatcgagtggaacgcgtttgcgatgccgtgaaacggtcggcggaaaccggacgttgggtaacggtgaacgattgatcgaagcgcccgtttgacacgcagcccaaagccacatgtcataagagtgacccacaacggtaaagagcagattttcaaaatcgtgcagaccattgccgacgacgagatacaccggccggaagcccgagagaggtatctgtctaaatttcaaatttgccaaaagtccaccgcaattttcgtgaaattgcggtggacttttctttgataccggcgcagcaagttcgccctgcggctgctcggaaggcgctctgccttaaacgttccatatggatctgaatcttgacaaatttcggatttagaggtatgctattttgtgcttagagggtacctgtttacctaatcattacagcaaagaaagagagaggtacaccatgaatatttatagtgatgcaatcgagcagctcggtatattcaccatcgtcggcggaattttggctatcgtcgccacagttttggcctatgtgtttatcgtccccgaaaaacgccgcgaaaagctcaatgctttcggtaagttcctccacgatacctgcaatttcaagtacctgatcgtagagaaaattctgcaggctctgtacattttcttcacggcagatatgatcattctgggcttcttcatgctctttgccgcgcctaaagactactttggcaatcgccactggctgggcgtctatggcatcctgaccatgatcctcggacccattatgatccgactggtgtatgaactgttgatgatggcagtcttgctgctgaaaaacgtaatctccatcaacaataagctccgcaaccagaacggaaacgaagagaagaacggcattttcatggcccccgacatgggcgacctgcgccagcagcttcggtctaaggcagcacagcctcagaacccgcagcccaaagtcccgcagagcgcacctgtagccaaattctgcggcaagtgcggttcgccgttgaacgaagccggcaagtgccccaactgtgacaataatcagcctcaggcttaaacgcaaacattaagattatgccccgagcggaagcaatgccgctcggggcttttggttttgtccgcttcagcgaaacgacaacattgccccgtgcagcttatttgtcaatatttctctatgcaaacctcaaaacttctcattaaacattaaatacatatttttccgaatattgcaaatgattttccaccccaccccgcctgtcgcttttccgctcacctttcctattcttcaaatttagcatatttacattgtacttttcccgtgctatgatggtcttaacaaagacgaaaaggtgattttatggcgaaaaagctggcacatataagtgaagatcattcccgcgagcaaaccgtatacgaacacctcaccggcacggcagagcttgcaaagcagtttgccgccgcattcggcgcggaggaagacggctatctgctcggtttactgcacgacatcggcaagtacagcgatgcctttcagcatcgattagacggcggcgtgcgcgtagaccactccacggccggcgcaaaagaagcttgcgcgcacggtgtcgggtatctggcgctcgccatcgcaggccatcacggcggcataccgaatttcggctcccgcgccgataccaaaaacgacgctaccctctcgggccgcttaaaacgcgacctcgaaccgtatgacgattggaaaaccgaagtcactctgccgccggtcaagccctttaacatgcgagaattcaacaccgggtttcggctctcgttttatatccgcatgctgttttcttgccttgttgatgccgatttcatcgacaccgaaacctttatggacggcgcacttgccccgcgcggcaactacgatgcgctccctgcgctgctcgaccgcttggaaacgtacatcgcaccgtggtatccgcccaaaaccgagctcaaccgaaagcgctgcgccattttggacgcgtgcaaagcctccggcagcaccgccgcaccgggtgtttatacgcttaccgtgccgacgggtagcggaaaaacgaccgctgccatggcatttgcgctgaccgctgccgtgcaaaactgcatgagccgcgtcatctacgccgcgccgtacacgtccatcatcgaccaaaacgccgatacgtttgaaaaaatcttcggcacggaaaacgtcatcgagcaccacagcagcgcggaatatctcttttccgaaagcccgaaccccgcagaataccgcaaaatgctggccgcagaaaactgggacgcccccgtcatcgccacgaccaccgtgcagctgtttgagtccctgtttgcgagcaaacccgcccgctgccgcaagctgcacaacctcgccaacagcgtgctcatcttagacgaagtgcagacgctgcccatgccgtatctaaagccgttcacggcggcgcttgccgagcttgcccgaaagtacggcgtcattgtcgtcctgtgcaccgccacgcagcccgcgttagacggtgtttttgccgatttgaaaatcgacctgccgatcaaagagatctgtcccaatgtccctgaaaatttcgagaccttccgccgcacgaaaatcgcgcagcacacatttgacagcacagaatcgctcaccgccgagctcatcgcgctgccgcaggtgctttgcatcgtcaaccgcatcgcagacgcacagaaaatctatcaagcactgccaaaagatggcgcgtactgcctcaccacgcacctgtgccctgcccaccgcaaagcgcgcattaaggaaatttgcgaacgcctaaaaatcggcctgccctgccgcgtcgtttccacctcgctcatcgaagccggtgtcgatgtggatttcccgcgcgtctaccgcgaagaagccgggcttgattccgtcctgcaagccgccggccgctgcaatcgcgagggcaagcgcccgttagatgaaagcctcgtgaccgtcttcaccgtccagaacaccaccccgccgccctacatgcgccagcccgccgcagccatgaagaacatttcaaaacgcatggaggacatcacttcgttaactgcaatccgcgcgtattttgagttctatcgcgatttgtacggcaaagaagatctcgaccgtgagaagattctcatagcgttcgaaaacgagatgctcccgttcgcctccgttgcggaaaaggtacgggtcattgaaagctgcaccacgcccgtgtatatcccgatcgaccaaggcgaagccctcgtcgagcagctgtatcgcggtgaacgcagccgcaccctgttcagaaagctcgggcagtacagcgtgaacgtctacccgcagcagctcgctgccctgcgcgaagccggcgccgtgcagagcatcgacagcggcgcgctctatgtcctcgccgacccccgccgctacgacagtgccctcggcctcaccctcgaccaaaccgaaaccgctctgtttatataaaatagaaaagccggtaaggcaaacccttaccgacctttctatacaaataaaacgtagttgtttctacccacagttcaagtttgaaccgaccttactctcctattatacggttcttttcaaaatttgcaagaaaaactcaacttaacctattgacaatcatttttcctcgcattataatcaaattaacaaataaaacttagttgaagtttgaaaggagttgatcttattgattcagttggaagtttggggcccgtatgcgttattcacacgcggagagatgaaagtcgagcgtgcaagctacgatgtccccaccccgtccgctgcgcgtggcatagttgaatctatctacctgcatccgggtatgcgttgggtaatccgccgcatctacgttttgaaccccatcgagttcaccaccattcggcgcaacgaggtaaaaagcaaaattctcgggggcaccgccatgcgcatcgcgcagagcaaggaagatgagccgtacctcgtcacgacgaaacaaattgtccagcgcgcctccatggtgctgacaaacgtccactatgtcatcgaagcggagttcgagatgctgccggaaaaagccgcacccggcgataaccccggcaagtttcaggacatcgtcacgcgccgcatgagaaaaggccagtgcttttccaccccgtacttcggctgccgcgagtttcccgcacacttcaagcagtgggagggtggcccgatcccgacgattgacgagacgcgcgacctcggctttatgctgtacgatttcgattattccgacccacaaaatatcacgcccctgtatttccgtgccaaaatggagcacggtgtcattcaggtggccggctgcgaggtgttcagatgatcctgcaagccttagttcagtattacgaagcgctccttgcccgcggtaagatcgaccgcccgggctggagcaaagtcaatgtcagctggcgtctggacctaaacccggacggttcccttttcgatgtttctcccctccaaaagccctctccaaacggtaaaaagatgctgccgcagcagctcgccgtgcccgcacaggtcaagcgctcttccggtgttgcggcaaattttctgtgtgatacgtcttcctacctgctcggcgtggacgacaaaggtaagcccgagcgcaccaaagcttgctttgaagccagccgagaaaagcatctggaaattttgaaagatacccccggtgaagccgccgcggccgtccgcgcgtttttcgacacctggaatccctcctctgccgtcgagcaccctgctttgcagccctatctttcggaaatttataagggcggcaatctgatcttttattataacaataagcccgcggcaaacgactctgacatcgccgccgcgtggcagcaggcctatgattctgcttcagattccgacacgcccacccggtgcagtgtcaccggcaagctcgcccctgccgcgcgtctgcacggcaacattcaaggcgtgcgcggcgcacaaagctccggcgcatcgctcgtttcgttcaacgccgaggccttctgctcctacgggcacgagcagggcgagaacgctcccgtcagcacctacgctatgaccgcttacacgcaggcgctaaactacctgctgcgcagtgataatgtccgccgcatcggcgatgtcaccgtcgtatattgggtggagaatgccgatcctgccatcgccgcatttgcgggagctatgcttttcggtccgcaggagcagtccgattggagtgaaaacgacattttaggcgcaattcaaaaacttgtatccggcagaacagccgacctacaggacatgcacctcagccccgatacacacttttacattctggggctcgcgccgaacgccgcgcgcctttccgttcgctttttctggcaggataccttcacaaagctcgccaaaaacgtgaacgcccattacgagcgcttggagatcacccgcccagcctacgaaaaattcgacacgctttggccctacaccctcgcgcgctctgccgtccgcttttccaaagactggaaaaaagccgatgaagagctgcaaaaatccttcccgcgcctttccggcgacctgctcacttccatcctaaacgatacgcgctaccccgccactttactaaacggcaccgtgcagcgcatccgcgccgagcacgatgtcacctgggcgcgcgcgtccgtcataaaagcttattattctaaaaacgaagacccgctttgtccaaaggaggttttgaccgtgtccgtaaacaaagaaagcaccaatatcccctacaatctcggccgcctgttcgccgttttggagcgcacgcaggaagccgcaaatcccaacatcaacaccaccatcaaagaccgcttttttaactccgcttccgctacgccgagccttgtgttccccacgctcatcaatttagcgcagaagcacctcgcaaagctcaacgagggtcagcggattgcactggataaatccatcggcgaactttcggacaagctcggcgaaaccttcccaaagcagcttatgcttgcagaacagggcgcgttccagctcggctattaccagcagcgtcaggaatattttaagaaaaagacagacaccaccgaacagaaagaggaggcataaccatgcgtgaacccattcaaaaccgctacgatttcgtgatcttattcgatgtggaaaacggcaaccccaacggcgaccccgatgccggcaacatgccgcgcgtagacccggaaaccggcaacggcattataaccgatgtgtgcctaaagcgcaagatccgcaactatgtgcaggacgtcaaggaagatgagtccggctggcgcatttacattaaggatcaggttccactcaaccgcagcgacctcgaagccggcgaagcgctcggcatcggcgaagagcttgccgagattcaaaaaggcaaggacgccaaaaagattgtgacaaagctccgcagcaatgacccggatatcgacctcaagctccgtgacttcatgtgcagcgagtttttcgacatccgcacattcggcgcagtcatgacaacattcgtaaagggcgctttaaactgcggtcaggtgcgcggcccggtgcagctcggctttgcccgctccatcgaccccatcgtgccgcaggaggtcaccattacccgcactgccatcaccaccgaatccgacgcccagaacaaaaccaccgaaatgggccgcaaatacgtcgtgccctacggtctttaccgcgcagagggcttcgtttccgccaacctcgcccgccgcgtgaccggcttctccgaagaagaccttcaaatgctctggcaggccattctcaatatgtttgaaaacgaccacagcgccgcccgcggcaaaatggccgtgcgcgagctcatcatcttcaagcacgcgtccgagcttggcaacgccgcttcctataagctgttcgatgccgtaacggttaaaaaggtcgacggcgtagccgtcccgcgcaaattctccgattacaccgttaccgtttccaaagatctgcccgaaggcgtcacctgcgaacgtctttcctaaatggatgcgcgtgaagacggacttttaatgtccggcatccagcacttcgcgttctgccgccgccagtgggcgctcatccacatcgagcagcagtggcaggaaaatgcccgcaccgcacaggggcagctcgaccacgtccgctgccacgatgaaacgttgtccgaaaagcgcggcaacgttttcaccgtgcgcggcatgcgtgtgttcagccgtaaattgaacctctccggcgcgtgcgacgtcgtagagtttcataaagacaaaaacggcatttctttagaggggcagcccggattttggctgccctaccccatcgagtacaagcacggccgcgaaaaagagaccgatgccgaccgcttgcagctctgcgccgaagccatggcacttgaagaaatgctcgtgtgcgatatccccgcgggtgcgctctactacatagaaacgcgccgccgcgaggttgtcccgttcacggaagaactccgccgcaaaacggaagacaccgctgccgaaatgaaccgctatttcgcccgcggctacacaccaaaagtcaaacccggcaagcactgcaacgcctgctcgttaaaatcgatttgcctgccggtgctgtgcagccgtgcagatcccgtctcgtacctgcgcgcccacatttttgaaagcgaggaggatactccgtgagacaactgctcaacactctgttcgtgctcagcgaagacgcgtatctctccgtaaacggcgaaaatgtcgtcattagtcgcgagcaaaaggaagtcgcgcgcttcccgctgcacacgctcgagggcattctctgtttctcctacgccggcgcaagtcccgccttgatgggtgcctgcgtgcagcgcggtgtggacatcgcgtttttctccccgcgcgggcagtttttggcacgcaccgtcggcgaagagcgtggcaacgtcctcctgcggcaaacgcagaatcgcgtgtccgacgatccctatcaaagctgccgctacgcccgcgggttcatcctcggcaaggtctataacgcccgctgggtcttggagcgcgccacgcgtgaccacccccagcgcgtacccgtggaagcgcttaaaacagccgccgcacaaatggcacagtctttgccgctcatcgcctcctgcgaagaccccgcgcagctgctcggcttagaaggcgaagccgcaaagctgtatttcagcgtctttaaccacctcgttttgcagcagcaaagcgacttccgttttacctcgcgcagccgccggccgccgctcgataacatcaacgccttgctttcgttcgcctatacactcctcacgcgcgactgtaccgccgcgctcgaaagtgccgggctcgacccgtacatcggcttcatgcaccgcccaagacccggtcgccgcagtctcgcactcgacctcatggaggagctgcgcgccgtgtatgccgaccgctttgtgctctcctgcgtgaaccgcaagatcatcaccgcaaagcacctgcaaaagcaggaaagcggagccgtgcttttaacggatgacggccgccgcgcgtttcttggcgcatggcaaagcaaaaagcaggagcaaatcacgcacccgtttttaaaagagaagattccgtgggggctcgtgccctacgtgcaggcgctcctgctcgcccgcactctgcgcggcgatctggaagcgtatccgccgtttttctggaagtgaggtcaaaatgctggtcttaattacctacgacgtcaacacggaaaccgccgccgggaaaaagcgtctccgcaaagtcgctaaaaagtgcgtagaccacgggcagcgcgtacaaaactccgttttcgagtgcttgctgaccgccgcgcagtatgttacactgaaggcagagctcaccgcgctcatcgagcccgaaacggacagcctgcggttttaccgtctcggcaatcaatataagcaaaacgtagagcacgtcggcgtacagcccacctacgcgcaggattccgtcctgctcatctgattacccgcagtgcgaagccgaagcgcacacgcttttcccgcttccttcgcaccaaatcaaagcccaaaatttgtcctttttaaaacgccatcggcaaatttttctctttccgcgtcttaaagaggcaaattcttctcccttttgcgcaaaaacagatgaaaactttgtccgtttttgctgtcgccctccacccggagggcgtggatagaaataaaacaacaaccgtccaaaatttccgggtcaattatagtcgccctccacccggagggcgtggatagaaattacaacgcatattgcgaaaagcattatgcgaagtgtcgccctccacccggagggcgtggatagaaattatcaattatcgcaattacgtcccggtcgtaaccccgtcgccctccacccggagggcgtggatagaaattcgtcatatccgagaaatacgcgtcgccgccgttgtcgccctccacccggagggcgtggatagaaatatgggtgatccttcctttcgtcttcgaggtccgcgagtcgccctccacccggagggcgtggatagaaatcgcccatgtgcttgtcaaaagagagcatctgaccagtcgccctccacccggagggcgtggatagaaatgaggggtctttgataaacccaacgccctttttgccgtcgccctccacccggagggcgtggatagaaatcgaaagagtggattagtgacagagacgtctataggtcgccctccacccggagggcgtggatagaaatcgccgtgaacaagctgcggcagatgtggcagcatagtcgccctccacccggagggcgtggatagaaattcgggtatgcttgtaatcatgtcaaagtgcctaaccggtcgccctccacccggagggcgtggatagaaatattgtacattttcatcgccgcagcaatttcccaggtcgccctccacccggagggcgtggatagaaattcttcggcggctttacggctctttcgaggattttttgtcgccctccacccggagggcgtggatagaaatattttgtctataatgtagattttttttcaactgggtcgccctccacccggagggcgtggatagaaatacgacacgctgcccgacggcagcacgccggctgcggtcgccctccacccggagggcgtggatagaaatcggacggctctttttttattcgggcactggcgggtcgccctccacccggagggcgtggatagaaataacgcgcggagcctttacaactatgacttgcgcgagtcgccctccacccggagggcgtggatagaaattcacaagcgttgccggcctgcctgagctgccaggtcgccctccacccggagggcgtggatagaaatacactctgtgttgcgtcgaatgctgtgttgatgatgtcgccctccacccggagggcgtggatagaaatgtaactgtgttgttcgagtaagcccgtgccgatagcgtcgccctccacccggagggcgtggatagaaatattgtacattttcatcgccgcagcaatttcccaggtcgccctccacccggagggcgtggatagaaattcttcggcggctttacggctctttcgaggattttttgtcgccctccacccggagggcgtggatagaaataccgtaaaggtgcattgcggttgtaaagccgaggtcgccctccacccggagggcgtggatagaaatacgctgaccttagacccagaaaggattgaccgagtcgccctccacccagagggcgtggatagaaatacacctgatagaatgttagaaattgcagaagacggtcgccctccacccggagggcgtggatagaaatacacctgatagaatgttagaaattgcagaagacggtcgccctccacccggagggcgtggatagaaatcttgatggaataccgtccgttttggagggcaacatatcgccctccacccgaagagcgtggatagaaatcgtgagagaaaagctggagcgctacaaggttgcgtcgccttcacccggagggcgtggatagaaatcccgaccacccatttaaggtgcgtgatgacgaggagtcgccctccatccggagggcgtgggtagaacgcaaatcgtaacacttgacttttggacgtgacatgcccccaagtctgcgaataaagccaaagatgcgccgggcatcaaaacggcggaacagctcgaaaagcgctttcatctgctgcgaaaagcggcggatgagggcgttcttttgccgttaaaaccggacattgcaggacagtatgggacatcggcggacaactttcgcaaaacctctttacagaacaaacgtttttagctataatgagatacagaaagggggcggcagcatgacggagaacaggccgcgcatggcgatctgctacgattttgacaaaacactttccccggacgacatgcagacgttcacgctcatcccgtcttttggcattgacaaagacaaattctgggcggaaacggacgcattcgcgcgggaaaacagcatggaaagcaacctttcgtggatgttcatgcttgttcgctattcacgctttctcggaaaatccttaaaacgcgagtattttcgggccatcggtgcgcaggtggagctgtaccgcggcgttacggattggttcgcgcgcacgacagcgtatgctgcgcagcgcggcattgagcttgaacactatatcatttcttcgggtcttaaagaaatcatcgagggcagcgccatcgcgaagaatttcaaacgcatttatgcctcctcctacctctacaccacggatggcgtagcggagtggcccgcgcaggccatcaattacacgaacaagacgcagttcattttccgcattgcaaaaggctttttggaggagtacgacgagcgcgtaaacgacagcatgcccgaggaaaacctgcgcattccgtatgagaacatcgtctatatcggcgacagcgccacggacattccgtgcatgcggctcgtgaaaagcaaaggcggttactccgtcggcgtatacgacccggagaaaaataaccgcgccaaagtatacaagctgtataatgacaaccgattaaatttctatgcgcccgccgattatacagaacggagcaacttataccgctacatgcagcagatcatcgacgaagtcgccgcgcgggaacagattaagagcgagcgcgaaattctgcgtcagcctgccgaagcctacaaaatgcgctccatgctcgaaaagctcgagaccggctatccggaaaagctgaccccgcaagagattaccgagctgcaaaagctggaagcgatgatcaaatcgcgcactccgggagagatcgattgatggatgacgtaaagtactttccgtacggcgaaaaagagctcgcttatttacggaaaaaggacaagaagctctcggcggtcatcaaccgcgtggggcacattgagcgcgccgtggacgacgaccttttttccgccgtggtacgccacatcgtggggcaacagatttccacaaaggcgcaggcaaccgtttgggcgcgcgtgcagaacgccctcggcacggtcgatgccgaacacgttttggactatggcgaagcaaatttgcagtcgctcggcatttcgttccgcaaggcggaatacatcacggacttcgcgaagaaggtgcatacgggcgaatttgatttaatcagcatcggcgaaaagccggatgaagaggtcatcctcgagctcagcgcgctcaagggcatcggcgtatggacagcggaaatgctgcttttattctgcctgcagcgcccgaatgtgttcagctacggcgacctcgccattttgcgcggcatgcgcatggtctaccgccacaaggagatcgaccgcgcacggttcgagcagtaccgcaaacgtttttctccgtattgcagcatcgcaagtttatatttctgggcggtctccggcggcgtgctccccgaactcaccgaccccgccgcgccgaaaccgaagaaataaacgtacattttcgcacaaatagaaaaagatagtcttccaaagcgtttgttttgcttagaaagactatcttttttatatcgtttttatcataacgaaattcgtgagccagacgccgtaacgctctacttgctgttctttaatggccgcatagtcgcgcttttgcagcgacaaactcagtccttcgggactttgacccagatgccgggggtcttttcggcttccataagggcgccccaggcgctgatgatggagagcgtctcgctgtgcggggcagggatggtgccgtttttgaagaactcgacgagcgcctcaatgaagtggcggaagtaatcggagcaaatttccagtacggaattttccgtggagcgcgcaatgttcatcatgaacggcgagccctttgcgtagccggaaagcgttgcggtgcggccgtccgcaaagcgcagaacgccggtgtacacctcgtcgtttgtcaggtgcatgacttccgtcgcgggagcctgcatcatcatgaagatcggctccagctggtggatggcgtaatcctcaaaaccgttcggaccccatgcattgacacccttgatgttcgttttatccgctgtctgatactcctccgcaaaacgcagcgcggaagacgaccagcacggcgtgccgctctgctcggcaagatcgagcatacgctttgcagcgaagtgatccggtgcgaaggttttatccacatagcagcgcttgccggagcgcagcgcgaggtttgcgagttcttcgtgctttttcgggtcgcgcggggcgagcacgagcagaacgtcactcttttcgatgagctcctcctgcgtcatcatgcgggtgagaccgtatttttcgcaccatgcgtccgttgtgaggccgccctcggggctgtcgatttcagcccaggcgtacacggcttctacctcgccgtttgagtaatcgtgcagcatgtgaacgtagttattggcgtgccactagtctaaatagtaatcgataaaaccgactttgatcatgcttttgactcctttaaactgaatttcaatacaactttccggcgtacttttccgccggtattcgcgttcattatagcacattccgccgttttgtaccgcagtttttgcgaaatttcgaaagttcatgaaaaaagcaaaccctttgtgtgaaatatgcaaaaagcgccccgaatgctcggaacgctttttgcatatttggaaattcggtgtggtttttgccgccttatctcgcgtttttcttgacgcgcaggcggttgatggcgcgggcaaggttcgcctgcgcggtgcggtattcgcgcacgctgcgcttttggaggatggcctccttcgcctcatcggcggcgcgctgtgcacgtttggcatcgatctcttccgggtactcggcagagtctacaagcacgaggacatcgttgccctcgaccttcaccatgccctcggaaacggcagcggtgcgccactccttacccggtgcgcggtaagagagcacgcccggcacgacggcggagatcatattgctgtgacccgccagaatgccgtactggccgaccgttgtgggcacaacaagcgactcgcactcgccctcgaaaaagaccttatcggcttcaagcaggtgcatctgaaatgtacgcatcagatcgcctccgcctctagctgcttcgctttcgcgatgacgtcctcgagcgtacctacgttatagaacgccgcctcagggtactggtccatttcgccgtctacgatggccttgaagccgcgcagcgtctctttgagcgggacgtaaacgcccggcacgctggagaacttttctgcgacgtgcatcggctgcgagaggaaacgctgaatctttctcgcgcgctgcacggtgagctggtcttcgtcgctgagctcgtccataccgaggatggcgatgatgtcctgcagttcgctgtacttctggagggtctcctgcacttcacgcgcgatgcggtagtgctcctcgccgacaacatcggcttcgaggatacgggaggtggactccagcggatcgacggcggggtaaatgccctgctcggcgatcttacggctcaaaacggtcgtagcgtcgaggtgggcgaacgttgtggccggggccgggtcggtaaggtcatcggcaggcacgtaaacagcctgaaccgaggtgacggagccgtcttttgtggaggtgatgcgctcctgcagctcgcccatttcgtttgcgagggtcggctgataaccgacggcggaaggcatacggccgagaagcgtggaaacctcactgccggcctgcacgaaacggaagatgttatcgatgaagagcagaacgtccttgtgctcttcgtcacggaaatgctctgccatggtgaggccggagagggcgacacgcatacgcacgcccggggactcgttcatctggccgaagacgagcgccgttttatcgccgacaccgctttcacgcatttcacgccagaggtcgttaccctcacggctgcgctcgccgacgccggtaaacacggagtaaccgccatgctccatggcgacgttgtggatgagctcctggataaggacggtcttgccgacgcctgcgccgccgaacagaccgattttgccgcccttcgggtacggctccagaagatcgatgaccttgatgccggtctcgaggatctcgacggccgggttctgctcatcaaacgacggagcttttctgtaaatgcttttgtgcggctcggttgcgggaacggcttcgccgccgtcgatgggatcgccgagcacgttgaacatgcggccgagcgtgttttcgcccaccggcacttcgatggttttgcccggagcctcaacctgcataccgcgggaaagaccctcactgccggaaagcatgacgcagcggaccgtgttgtcacccacatgctgggcaacctccatcacataccgccgtccgtccacggtaagcgaaagggcttctctgattttcggcagaacgccggactcgaactgtacgtcgatgaccgggccggagatctgtacgatcttacctgtattcacgttgttcacgcttccttcctgtgtttttgacgctgtgccttcgcaccggcggagacctctgtaatctcctgcgtgatggcagcctgacgcacgcggttatactgcaaggaaagctctgcgaggagcttttccgcgttgctgttggcggaatccatcgccgtcatgcgggcattctgctcgctgcagaagctatcgatgagggcactgtaaataaagcccgaaacgtagctttgcatgatgttgttgagaaccgcctgcacggagggtacaaactcgaacggcgtggtgaccgccttttccaccgtatccgtctggaaataggcgcggtggaacggcagcagacgcgtgcagtgtgcagaggacgtgaggctgttctccatatcggtataaatgacaaaaatcttcttaaaatccccgcggtcgtagccctcgagcaggatgtcgcaaatttctctcgcgcgctgcatggtagggttctgtgccgtatagaggaagctgtgctccatggggatattgtgctgcgtaaagaagtggcggccgtattcgcctacaacgtagagcttcgtgtcgggatgctcatcgagcatgtgcatagcttccttgatgacgttctggttgtatgcgcccgcgaggcccttatccgccgtgatgacgaggcacgcgtaggtgccctccagcggcggctcgccctcggggggatagaaatagcggctgtccacatcgttctgggtacggaagatacgcttgatctccgtgcgcagcgcctcgaaatacgggcgcgtgcggtccagatcgttgcgtgctttgcgcagctttgtggaagcgataagatacatggcgtttgtgattttacgcgtatccttaacgctttcgattctggttttaatctcttttgtattagccatagcgaaaaccgcctttccgagcgcttacgcgttctgcgggttttccgccttgtacttttcgaggaattccttcgcgactttcaaaatctcttcgcggtcggagtcggaaagctgaccggtggtatcgacacggcggcagacatcgctcatattcttctcggcgtactggatgagctccgtgtgaaaacgacccatatcgtcaagcgggacgtcctgcatgacgtggtgcagggcggagacgagcgtgatgacctgatcgtgctggctcatcggatggtactgcggctgacgcagcagacgcatgaggctctgaccgtaggtgagctgacgctttgtggtctcgtcaaggtcgctggagaactgggtgaagacttccatttcgcggtactgggcaaggtccaggcggatgccgcccgctgcctttttcatggcctttgtctgggcgtcgccgccgacacgggaaaccgaaagaccgacgttgacagccggacgctggccggagaagaacaggtcgctctcaaggaagatctgaccgtctgtgatggaaataatgttcgtcgggatgtaagcggaaacatcgcccgcctgcgtttcaacaatcggcaatgccgtcatgctgccgccgccgagtgcatcggaaagatgcgcggaacgctccaacaaacgggaatgcaggtagaaaacgtcacccggatacgcttcacgacccggagaacgctccaaaagcaggctcagtgcacggtacgcaatggcgtgctttgaaaggtcatcgtacacgatgaggacatctctgccctgatacatgaagtgctcgccaagtgcgcagccggcatacggtgcgatgtattgcaaggaagccgggtcactggcagatgcgttgacgacgatggtgtaatccatggcgccgcggcgctttaaggtctccacaagctgtgcaacggagctggacttctgaccgatggcgacatagatgcaaacgacgttcttgcccttctggttcaaaatggtatcgagcgcgacggcggttttaccggtctggcggtcgccgatgataagttcacgctggccgcggccaatcgggaacatggaatcgatggcgagaaggccggtttccataggcgcgttgaccggctggcggtcgatgatgcccggtgcggggcactcgatggggcggtagccctcggcgctgatgtcacccttgccgtcgatcggcgtgccgagtgcatcgacaacacggccgaggaagccgtcgccgaccgggataccggcggtcttgccgcttctgcgcacaaggctgccctcggtgatctcggcatcgtcgccaaagaggacgcagccgatctcattgtggcgcaggtcttgcaccatgcccttaacgccggaggagaacaggagaatttcgccataggcggcatgctcaaggccactgacaacggcaatctcatcgccaacggtgagaaccgtaccggtctcttccgcttctgcggacggggtaaaatcttcaacggcttccttcatcagcggaatgacggaatcgctgccggactttaacgcctttagcttttcttcaaactggcgcagacggcttttgaggctccaatcgtacacatcggtgccgacggtaagcgtgaagccgttcagcattttatcttcttcaaaggtgagcggaatctcacggccataggtacgcagcaggaattccgcaaagcgtttttcctgttcggcatccgggcggcggctgccgcggagaacggctacggccttttcatctgcattacgcattcggctctcccctctctgcctgatcgaggaacgcgtcatacggatcgccatctttataaacaagcttcttggtcgcttccatagcgagctcggtaagctccttctgtgcgtctgcgatcatcttatcatgtacacgggcggcatccttctgcgcatcggcgacgatcttatccgcctgtgcatgggcatcggaaagctgctgctgtacgctgcggtcgagctctttctgcgcttcggttctctttgcgctgatctcgccctcaacggacttgagctgctcctgataatccgccttgatcttttcggcggaatcgagttcactttgggccttctgtgccatttcggcataatgcgcttcgcgctttgccatgaagttcttgaccggcttgtacaaaaggaaatacaggccgccgaacaaaatgacgaaattcagtacatgcagcaaaatctgctgccaatcaatattcagtgggatgttcacgatctgcactctcctttacaggacgaagatgatgaggataacaacgagcagggcataaatgatggccgtctcgataaagacaaggccgagcatgagggtggtacggatcttgctttcagcctccggctgacgtgcgatgccctcaacagccttacctgcagagagacccataccgactgcaccaccggcggctgcaataccgactgcaatagcggaagcaagtgccttaaggccagttgtgctgtctgcggtggtggctgcagcttctactgcggtttcggctgttgccgtggtggttgcggcatcaccgtttgttgcggcgaataccggaatggagatggcgaggatggcgatgactgccagcagaatgatggcaagcttctttaactttctctgttttgcgttcatgatattttccctccgtaggttaattttcagcttctgcttttacttttttctttttcggttcctgcttctcggaaacctcgccgaaatagagcgcgacgagcatcgtcaaaacatatgcctgaatgagcgcgtgcagcagcgtgaacataacgcccacgatgaccggcagcacaaagctcagattcacataataatacacaagctccgtaacgagcaagccgcttaaaagcgcgccgaacagacggaagctcatggaaatcggcagcgagaactcctttaaagtgctgcccacgcctttgaagccgttatatgcgataccgcctcccagaatgacgaggtacgagaagcagcccatggcgatggcggcgttgacatcggacagcggcgccggaagcgtgatgggcgaaccctccgttgtgatagcctgaatgccgaacagctcaaagagtgtaccgatgaaaatgtacgcgccggccgtgaagatgtacgcaccgaggaagccgctgcgccccgggctgttggacttagccatgccgtcgaacaggtctaccgcctgctcaaggagcatctggaactttccgggcaccatcttaaagcgcggaatgacgaaaatgcgcacgatgaccgcaaacaccagcaagatgcccgagaccaccatggcggagatcaacgccgggttgacatctttgatgccgaagaggctgattttgttcgtctcatgcagaaccgcgtcacgcatggtcacctgaatcgtttcggtcttctgcaccgaaggaaccagaatgcttgcgacgagcagcaccacaatagcgcagatccacaaagccagctttgttttctttgctttcattgtttttccctttctttctcaaaattttgccttccatttcaatatcaccgggcaaaaattcccccttcagcgctgcgccccaaaagggcacacgaccgcatctttcgccgctgtgaaaagcagcaacaagacacggtcacaagagcacacgtttttgttgacattgaccaaatatcctgctacttttttgtaaactgtatttggaagcatctgtattatacgcacattaaatcgaattgtaaaatgttatattgacatatctactatttcatttttgatattttagtaagccgtatgaaatttcattatgccgtgcgctatttttctctttacaaataaagataagatggaacggcgcgcgggaaaagtctggctttttcaacttgacaggggctttccccttgctttatactggagaaaacagatggaaacggggagacaatatgcggacggtttataaaaacggcacggtttacacgggaaacggctttgtgacggattttgcggtggaaaacgggaaattctgctttgtgggcgagacggataaagccacggcagatgaagtagtcgatttaggcggaaaattcgtctgcgcggggtttaatgactcacacatgcatgtgctgaacctcggcaatgtactgacaatggcgaacctcggcgcgcacacgacgtctttaaaggagatgctcgactgtctgcgcacttatataaaggaaacgggcgtaacacccggcacgtgggtgcaggggcgcggctttaaccacgattattttgcagacgagcgccgctttccgacgcggtgggacttagacgctgtttcgaccgagcacccgatctgcattacgcgggcgtgcgggcacatctgcgtagtgaactcgaaggcgctggaagtgttgggcattacgaaggacacgccgcaggtggcgggcggcagctttgctttagatgaaaacggcgagccaaacgggcagttttttgaaaacgccgtagcggtggtgtacgcgggcattccggagccggatgaggcgcagctgtgtgcaatgctgcgcgcctcctgcaagcggctgaaccgttacggcatcacctcttgccaaagcgacgactacgagacgttccccggtgtgccgtacaagacggtgcagaagcttttgagaacgccggggctgatgacggtgcgcgtgaacgagcaggcacagtttacgaacgtagaggcgctttctgcttatatagaaagcggcgatgcgtattttgaagacgatatgttccgcgcgggaccgctgaagatcatctcggacgggtcgctcggcgcacgcacagcgtgtttaagccgcccgtatgcggacgatgagaacgcacgcggcattccgctatacacgaatgcggaattgaacgggcttatctctcttgcgaacgaaaagggactttccgttgcggtacacgccatcggcgacggggcgctcgacaacgtattggacgcttacgaaaaggcgcttcatgagcacccgcgcgacgaccaccgacatggcatcgtgcactgccagattgtgcggcgtgaccagattgagcgcatgaaggaattaaagctgcgcgtgaatttgcagtcgatcttcctcgactacgacacgcacattgtgcgcgagcgtgtgggcgatgaattggcgggcacaagttacccggctaagacgcttttgaacgcgcgcattccgttctcgaacggctcggacgcgccggtggaggagccgaacgtgatgcgcggcatggagtgcgcggtgacgcggcgaagcattggctcaacggacgcaccgtatcgcccggaggaagcgctgacggtacgggaggccatcgactcgtttacaaaaagcggcgcggtggcgtcatttgaggaaggcaaaaagggcgagattgcaaacggacagcttgcggactttgtggtgctttccgaagatccgttcaaggcggacgccaacacgctgcaccgtattgaagccgaggcgacgtatttgggcggcaaatgcgtttacaaaaaataaaacgatgaaaattccgggtaaggcttgtctttgcccggttttcgtttataatggatagggcgcgtgtattcggtgcgctgcttatttttctcaggggagaacatctatgggtaaatttacatttcatccggtcaaatcgctgcagtctgatccgaaactgcgcatgctgtgccttttcggcattgagggctttttattgcagtatgccgtttcgctttactcgctggcgaacaatttgtatgcgacgaatcttggcgcgacggacacgcagatcggccttgtgcagatggtgccgaacatggtggcgggcatctgtatgattccggtgggattccttgcgaaccgtacgaagacgagccgcacggtgccgttcgtactggcgctgtttttgagcgcggcgtattttgcttacggctctgtgccgctgttcggcgagcaccgcatgacggcattttttgtgtttctcggcatgacggtaggcggcattgcgctgtataacgcgcagtggcagacattcttcggtgacgcggtggagccgggcctgcgcaacagtgtgttcacgttccgcagccggtgtctgttctttgtgggcattgtggtgccgcttttgtgcggcaatgtcatgacgctgatgccggacaccgagggaaagctcattgtgctgcgcattttcttttatattgcaggcgtatgcatgcttttgcaggcgcttgtgctgcgccgcatcccctgtccgccgcgcaaggcggaagaaaagcaggagatgggactgaaaatgttcccggaagctttgaaccagatggtacgcagcaagccgttccgcggctttttcatctgcatcatgctgttttacctttcgtggcacctggactggagcctttggtacatagcggagacaaaatatgccggcatgaacgaagcgcagctgagcttttttcaggctttgtgttccatttgccagatgatcttcatcggctttttctcgaaactgtgccgccgcaaatccgagcattttacaatcattttcgtatgcgcgggcctgttgctctgcccccttacggtggcttctatgacgttgctgccgcaaagcgcgcgtatgccgtattttatgattctggcgctcatcggcaacattccgcagggtgcgacgaacatgtgcgtggtgcagctacttttgcaggcgacgccgaaaaagaaccgcgcgcttatcatcagcatttatacgctgtttgtgacgctgagcaactcgcttttgccgttcttcggcgtttcggtctacacggcgctcggcgcgaacgacacggcaatcttcacggtgaacgtgatcgaatctgcggcgcgctttggggtgctgattatgatgatcctccgttaccgcatgatgaagcgccgcggcgacttgttccgcccgctgtgtgaagagtaaggagaaacgtatggctcttgttttataccatgttgaagacgctgcgaaggaaaagcagctttctgcactgtgcagagaactgcacctgacggcaagacgtctgacgaacgccgaccgtgaccgcgcagttgcagcgctgtgcggcgagaaagtgaacgcgaacgtgcagaaagccccggcgggctacaagctgccggaggtgctgattttctccggctttgcgggtgagatgctggacgtgttccttgcggcgtacaaaaaaacgggtatcgcgcccattccgctgaaagccgtacgcacggagcacaacgacaagtggagcctttacgcactgtgcgaggagctgcgccgcgagcacgccgccatgctgctacgtgggagctttggaaagtaaggttattgataatttaaagatggaatgaccccgagggtttgaaactcggggtcgttttttatacaaaaagcgcccgcagaagatggctctgcgggcgctgggttttagttttcgtttaaggggttggggccggcgcctacgtcgtagatctggatatagaactgcgaattggagacgaggagcatataggcggggtcgtagctgcggatgggatagagcgtatcgtaggctttgcgcacctcgccgtttgcgagctgctgtgcgccgaggcggtaagtcgcctccgtgacgcgggaggcggcgtcgccgtaatcgccggcggccttgaactccgcgatggcgttttcgtaatcggcgttgttgtaatactgctccgcttttagcgcgtggatgcgcagaagctgcgtcgggcagtcttcatattcgccaagctttgcgaaaatttcggtcgccttgtcgtactcgccgtcttcgacgagctttaacgcctgcgcgtagtaggcggcgtcaatcttcgggagaaagtctttatcggtgacatactcaaaataggtaagtgctttttcttcgtcgcccttttcgtagaacgcgatgcctttatcacagaatgcggcctgcattttcttattctgctccgcgttgacttctttaaaatgcgcggcggcagattttaagttatccgcttcgagggccttcatgccgagctcatagtgacaggtctcgcttttttcggcggcatccttgtaatccttgaggggctcaaggagatttaacgcatcttcgtatgcgccgctttcaaacgtctttacggcacggcggtactcggcctcggtgatccgatctttgctgtcttcgtaatcgccgagggcggtgaaggcttcgatggcttctgcgaatttctcgttttcgagcaggtcgcaggcttttttgtactctgcctccgtgatgcgggcggcgctgtcgctgtatccgtcgagcgccgtgaacgcggtgatggcttcgtcatacttgccggcttcgagcaaagcggcggcatcgttatagtggttctgcgggatgatgtagacgatgagcaccacgacgaacgcggcgatgaggacggcgagcggaatggaaatagacaggaaaattttgcggtggagccgctttttgcgggcggcttcctcagcggcggccttttcctctgccgctttgcgggcggcagcttcggcggcggctttttcctctgccgctttcttttctgcggcgatgcgggcggcctcggccttttcagcttcagccttgttataggcttcgaggttttctttcagcttttcttcgtcttcaaacagtgcgtgctggggcccgtactcggcaccgcaggcggcgcatttttcttcatctttgtggttcacttcgccgcaggcgcacatccagaggtctttatattcctgcgggacgaactgcgccgcagcttctttatcctctgccatttcggtgaaatcgcgctgatactgtgcacggaggtcttcgtcctccatgacatccgcgattttcgcctgttcggggagattttcaaacagcagtgaggcactgccgttccagaacacgtcttcgccctcgaactgcaccttcttaatggcgacggagaagctgtacgcggcgtcatcaacgtcgatctcctcgtctgcgccgaagaccgcatcgcggcccaaaataggcacgagatagcggcggtcgcgcacgacggcgagctcgtttgtggctttgtcgaaaatgtggatatcgacataaacgctcgtcacggcacgggggtcgatattgcggaatgcgagacgcaggaatgtgcgcggggaagccgcttcttcctgctctgcggggagcgtagcttccgcagtttcgatctcttccgcttcggcggacgcggtgggctcttcacggtacagcgcgccgctttgcagcaagaccgggcaggactctctatattgatttttcagttcaaaaagcggctcaaaatcagccatagtttctttccgtcctttttatctgcttatcgtcgaggccgttgtggcttcgacggttttcatacaatacatactcagtttaattatacctgattagggcgaaaaagcaaggaaaaagtgcgtgggtggggagaaagtttatgagatttcggggcaacgcccagagccgccattcgaaaatggcggaatactttttgcctaatcgaagatcaggaaaatagaaaaaccgtccagtggacggtttttcgcaagaaaccctatcaagggtttcttgaaagtgagctacgcgagcctttttaaatgtaacgttgtatttcttacttcaagaacggcagcttgccgatgatggcggcgtcctttgctttgccgctgcatacctggaagaagcagatgatgcgcacgacgaagagaattgcaatgcagacagcgccggcaatcggcacaatgaacgtgaaagcaagcacagcggaaacgatgagcagcagggtgctgacgatgtcaagcttcaacgcctgacgggaatggaacgccgcgtatttgctctgcggtgccgcaagcagtgcgatgatgatgccgacggtgccgagaatgtacgctgccatggcgatgaccttattctgggagacatcctccgggtcgaactctgcggtgtgatctgccgggtcatacacaggctgctggggatagaccggctgctggtatacgggctgctgcgggtaaaccggcggctggggctgctgctcgggtgcctgcggctgtgctgccggctgctccggagtccgggtgggctgcgcctgtgccgctacgggcgcaccgcaagctgcgcagaaggtgccgttttcggggatctgtgctccgcatttttcacaaaaagccataaatttctaccgtcctttcgcgcagatacccgcagtcgacatgccgccgccgtttcgctgcgcatcaatttttattgtttttattataacaaattcgatttcggttgtaaatgcttgtcaggaaattttaagaaaaccgtcagccgctcttcctatgttctgtctgcggctgcgaaagcgcgtgaagcatacgcatttttccaaaatcaagtccggcttttaaactgctgaggtgaaaggccggtttgggttttgaaggctttgtagaatgtggaataatcggaaaagccgcactcgcggccggcttctacggcagggatgccttcgcgcagcatacggcgggcatgggtgagccgaagcgccatgatgtaggcgtacacggtagaattggtatatgctttaaagtggcggtttaagtacgatttgctgacgaagaactctgcggcgatgtcttcgagcgttaaaggctcgctgaaatgctccgtgatatagcgaatgacctgcgggatgacctgtgtttcattgcggtgcgtggtatcgataacgccgtaggagcggaagatcgtccacaggtacagctctacggcgccggcgcagaacttagggtcggtattgtttttctgcatatacaagagcttttttaagagcgccgtgacgaacaccgtttcatcgccgcgaaaaggcacgcagtagccgtgctcccccaccttttgcagatttttttgcaggtcgcccgcggggctgtcgatgctttggaggtactgcggggtaatccacagcaccatgcgctcataggcggcgtgctcgtttgcgatgacggggcggtgcattttgccggcgggaatgatgagcagatcgccggggcaaaggtcgtagacctgatcttcaatataatacgtcacgctgccgtccaaaaagtaatagagctccaaaaaatcgtgcgcgtgaaactccatggtgcgaaaataggggtctcgattgtgcgaaagctgaaaatcttgccgcagcatttcgtcatttttacctgtttccacgtttttcaccctcttcctttggagaaatcatagcacagcttgcgccgatttgcaatatatgtgccgcaatatatcatttattttgcaattcatcgtgctatacttacagtagcagcggtggggaaactttgcctttttctgccgcccgaaaggagtttattcagatgcgaaacgatctgtttttgaaaagcgatgttgctaagaatttatatgacgcggtgcgcgacctgccgatcgtcgactaccactgccatctctcgccgaaggagattctggaggacagggaattcccggatattgcgcagatctggctgggcggcgaccactacaagtggcgtttgatgcgtgcctgcggcgtgccggaggcgctcatcacaggcgacgcggagccgcgcgagaagttccgcgcgtgggcggcgtgcctcgagactgcgatgggcaacccgctttatgtgtggtcacacatggagctttcgatgtttttcggcattgaagacacgctgacagcggaaagtgcggacgatatttttgaccgcgcgaacgcgtatatcaaggagcaccacctctccccgcgcaaactgatgctgcaaagccatgtggagcttgtggcgacaacggacgacccggcagattctttggaataccacaaggaaattgcgaaggagaagaacttcccggtgcgcgtggtgccctcgttccgcacggacgcggcgctgaacatttgccgcgcgaactatcgcgactacgccttgcacctcggcgaagtgtgcggttttagtgtggagacgctcgacgacctaaaagcggcgctttcaaagcggcttgatttcttctgcgagaacggctgccgcgtgagcgatatcggcattgagggcttcccgaaggaagacaaaagctgcgatgccgcggagacgtttaaaaaggcgctgaagggaaagacaatcccggaaaacgagttccgtaattttctatttgaaatgtatgtgtatttggcgcacgaatacaaggcgcataatgtgacgatgcagctgcacctgaacgtaaagcgtaacgcatgcacgcggctgtttgagaccgtgggtccggacgccggcggcgattgcgtgggcgacccgatcccggagcacgaagttgcagtacttttggacacgatggaccgcagggattcgctgccgcacacaatcttatacacgctggagccttcgatgtatatggcgcttgcgacgacggcgggcagttttaagggcgttgtgcccggcgcggcgtggtggttctgtgaccacaagcgcggcatggaggagcagctgaacattatggcggaaaccggccaccttgggcagtttaccggcatgctgacggacagccgcagcttcctttcctatgcgcgccacgattatttccgccgtgtgctgtgcaacagggtcgcggaagagcttatggacggcacgttcctcagcgaaaaggcggcgctgaagctgttgaccgacctttgcgtggaaaacagccgcaagctattcggcgaataaaagtcacgttataataaggaggaatttcctatgaatattgtcattaccggcgcgggcggcgtgctttgcagcgctttttcccgcgcgcttgccgcagacgggcacaaaatcgcactgcttgacctcaacttggaggctgcggagcgcgaggcggagggtatccgcaaggcgggcggtgaggccattgccgtgcaggcgaatgtgctggacaaagagagcctgaaaaaggcgcatgacgttgtgctggaaaaattcggcccgtgtgaggtgctcatcaacggtgcaggcggcaacaacccgaagggcaccacgacgagcgagtatttcagcaaagaagatatgctggacgaaaacgcgcggtcgttttttgaccttgatcaggacggcgtttcgttcgtgttcaacctgaactttctcggcacgctgctgacgacgcaggcatttgcgaccgacatgctggaaacaggtggctgcattgtgaatatctcctcgatgaacgcgtttacgccactgacgaagatcccggcgtacagcggtgccaaggcagcggtctcgaacttcacgcagtggctggcggtacactttgcaaactgcaacatccgcgtgaacgccattgcgccgggcttctttgcaacgaaccagaaccgcaccttgctctttaacgaggacggcagcctgaccccgcgcagtcacaaaatcatctcacagaccccgatgggccgcttcggcgagcctgaggagctgctcggcacactgcgcttcctcatcgacaatgacgcgtccggttttgtgaccggcatcacaatcccggtggacggcggtttctccgcgtactccggcgtataatctgacttttgggaggaatttttcatgatcatcggtgcacagggcttcaccatccgcgactatgcgcagaacgaagccgactttagagagacggcgaaaaagctgcacgacatcggctacaagaccttgcaggtctctgcgtttggcgacattgacccgcatatcatccgcgagatctgcgatgaaaacgggctttccatcatcattacgcatacgaacccgcagctcattctggagaacaccgaaaaggtgattgagaaccaccgcattttcggtacgaaccacgtgggcatcggcatgatgccgcagaaatacacgggctcgctggaaggtatgcgcgcgtttttgaaggatttcggccccgctgccgacaagctgcacgacgcgggcatgaagctgcactaccacaaccacggctttgaatatgagaaatttgacggcaagtgcctcatcgatcacatggcggaggagaccgacccggcaaaatggggctttatcttggacgtttattggacgcagtacggtgggcgctcgccgcaggtgcagattgaaaaaatggcgggacgcattgacgtcatccactttaaggacatgaagatgcacggccacgagcagcgctttgcagccgtgatggacggcaacatggactttaagtccatcattgaggcatgcgaaaagacaggcattcaatatgcgatgatcgaacaggacaactgctacgaccgcaatccgtttgacgagctgaagctgagcgccgaaaacctgcttcgtgccggctgcacgttctaaggagggcatatgacacagtttacactttccgcgtttgcagacgaagcctcgccggagtttgaccggcagattgcggcgctgcaccgcaagcatattccgttgatggaaatccgcggcgtggacggcaagagcattttagacctgacggacgaggagcttgatgttgttgaaaagaagcttgcagcgggcaatatcggcatttccgccatcggctcgcccatcggcaagatcggcattgaggacgactttgcaccgcactttgagaaattcaagcgcgctgtggagattgcgaaaaagctgcacaccacgcgcattcgcatgttcagcttctatattccggagggcaaaaatccggagatttatcacgataccgtgatcgagcgaatacagaaaatggtggactacggcgaagcaaatggcgtacattgctgccacgagaatgagaagggcatttacggcgacacgctcaagcgcgtggagaagctgcacaaagccattccggcgctgcggtgcgtatttgaccccgcaaactacattcagtgcggcgatgacccggcggtgaactttaaggcgctcgcaccgatcatcgactatatgcacatcaaagacgcgctgttcaaggacggcagcgtggtgcctgcgggtgagggagacggctctgtgccgagcattttaaaggcgctggcagaaacgggtaagccgtacatgctgacattggagccgcatttgtacgatttcagcggcttgcagaatttgcagggcgaggacgttctgcataagcgcgtatataaagacgcggacgaagcgtttgatgtggcttccgacgcgctgcacgatattttgaaaaccatcgaataacagaaagaaggcaattttatgagcgaaacagtaaaggtcggcattgtcggcatcggcaacatgggttcggcgcacgcaaagagcattttctccggcaatatcaagggtatggagcttgccgccgtgtgcgatattgcggaatcgaagcgcctttgggcggacgaaaatctgcccggcgtaccgtgctatgaagactacaaggaaatgatagacagcggcgtgtgtgacacggtgatcgtggcgacaccgcattacttccactcccccattgcgatctatgcttttgaaaagggcaagaacgtgctgacggagaagcctgccggcgtttacacgaagcaggtagaggaaatgaatgcggccgcgaaaaaatccggcaaggtgttcggcatcatgtacaatcagcgcacgaacccgaagttccagaaaatgcgcgagatcgtgcagagcggcgagctgggcgaactgaaacgctgcatttggatcattacgaactggtaccgcacgcaggcatactacgacagcggcacgtggcgtgcgacgtgggcaggcgaaggcggcggcgtgctgctgaaccagtgcccgcatcagcttgatttgtggcagtggatcttcggcatgccgaaccgcgtaatgggccactgcaagtacggccattggcacaacattgaggttgaggacgaagtgacggcttacgccgagtacccgaacggtgcgacgggcgcgttcatcaccacgacgggtgagtgcccgggcacgaaccgtttggagattacaggcgacaaaggcaagcttgtttgggaagaaggcaagctgacctggtggaagctcgccgtgccggagcgcgaattctgcgtgacgtgcaaagagggctttgcgcagcccgaaatgaccgtgaccgaagtggaaacggacaacattgagcttgggcataacggcattctgcagaacttcacaaacgctattctgtacggcgaagagctgctggcgccgggctatgagggcattaacggcctgaatatctcgaacgccattcacctttccgactggacgggcaagccgcaagctgtgccggtggacggcgagctgttcctgaaatatttaaacgagcgaagagcgacctcccacgtgaaggaagagaaagaagacagcggcaagattgcagacctttccggcacgtataacgaccgctggaaggtaagataagccgaacgacttgtcgttcagctatggtgatgaaaaagcacgcagattgaatttgtctgcgtgcttttgttttgaatgtgggatttccgtacagcttaaaattatccgtgcataaaaaacaatatgcaaaagcgccgcttccgggatgaaccgaaagcggcgctttctatgcgttaaatcttacgatttaagttttgattaagccttggtgcgctcttcgaggccgttgagctcgtctctgagctcctgcgggagcttgtcgccgaacttcttgtagaattcctctacgccggcagcttccttagcccacttagcgttatcaaccttgaggatggaagcgagcttctcctcatcgaagtccttaagaccttcgaggttgatgtcttccggcttcggaacgtagccgattgccgtctcaacagcgtcaacttcgttatcgcagcgcttgaggatccactcgagaacacggaggttgtcaccgaagcccggccaaatgaagtggccgtcttcgtcgacacggaaccagttgacgttgaagatcttcggagccttgtcgccgagcatctcgcccatttcgatccagtgcttgaagtagtcgcccatgttgtagccgcagaacgggagcatagccatcgggtcacgacggacaacgccgactgcacctgcagcagctgcggtggtctcggagccggtgatggaaccgatgaagacaccgttgttccagcttctggactggtaaaccagcggaaccgtatccggacggcggccgccgaagacgatagcggagaccggaacaccctgcgggttctcaaactcgctggagaggcacgggcagttagcggtaggagcggtgaagcggctgttcggatgagccagcttgttgccagcagcaatatactcggggccgtttaccttagcgcccttccactcttctgcgttgaccggcgggttcttgtcgaggctctcccaccaaacggtgttgtcatcgaggttacgcgcaacgttggtgaagatggcgcccttctgggtggagataagagcgttcgggttggacttcatgttcgtgccgggagcgacgccgaagaagccgttttccgggttgatggcatacagtctgccatccgggcccttgcgcatccaagcgatgtcgtcgccgacggtccaaaccttgtagccctttgcacggtagccttccggcggaatcatcatagccaggttggtcttgccgcaagcagacgggaatgcagcgcaaacgtacttaacctcgcccttcgggttctcaacgccgaggatgagcatgtgctctgccatccagccttcgttcttagcctgataggaagcaatacgcagagcgaagcacttcttgccgagcagaacgttgccgccgtaagcggagtttacggagatgatggtgttgtcttccgggaactggcagatccagcgcttctccgggtcaacgtcgcacttgcagtgcagaccgcgaacccagtcgttgctgtcgccgagaacgtccatgaccttctgaccgactctggtcataatggacatgttgagaacaacatagatggagtctgtcagctcaacgccgatcttagcgagcggggaaccgaccgggcccatggagtacgggataacgtacatggtgcggcccttgtagctgccacgagcaatatcgtacagcatcttgtatgcttcctgcggctctttccagtggttggtcgggcctgcgtcctcttcttttctggagcagatgagggttctgtcctcaacacgggcaacatcattcggagctgttctgtgatagtagcagcccgggagcttttcctgattcagcttgatcatttcgccggactcaactgcttccttgcggagctcttcgagctgctcttcggagccgtcgatccaaacaacctgatccggattgacaagagctttcatctcgtcgatccaagcaagaattgtcttgttgttagtcattgttatttctcctttcgccaaaaaggcaaataaaatgtaaaataacccatttgtctttattctaccacaagttccccgcataatcaattacaaaatcatgaattacccccatcttttttcgatatagcggtattgatttagcgcatatcagaggaaatttgcggagttttttaataatcgagctgtaaaagcgttacgcgtccgtttcgacgggtggcgttcatatcgataagacgctggttttcgctgccgcgaaagagcagctcaagattgcgctgctgttcgatatacggcccgtccaccagaacgtcgcacgcgtttaaaagcgcgtccacatcggggttgtgcatagaaacaagctgctcatatgtccagccggaataggcggtgacgtctttatgcagggcgtgcacctgctttgcgagcgctaaaagcggctttggctggcagaacggctcaccgcccgaaaacgtgatgccgcgcagcagcggattttttttgaacatgtcaaagatgacatcggtatcttccaccctgccgcccgcaaaatcatgcgtttgggggttatggcagccggggcaatggtgcggacagccctgtgtgaacacggtgaggcggatgccgcgcccgtccacgatggaatcgttcacgatgccggaaatgcgaatttccattttgccgtgccttacaggctgtgctttacgcggtcgtgttcttcggcgcgtttggcgtcgttccagcggtcggtggtgccgacaaggtagcctgtgatgcggcggatgcggtcaaatccgcggccttcgccgacgatgatggtttttgtatttttctgcgttttgggtgacatgataactgcctcgattctttttataaatacatttttacattcatttcaatttttctaaaggcggcggatgccgccttttaggtggttcttgggctggtttcgcgcagcgaaattaatgattttcaatcatcaaaagcacaaaaccatagctgaacgacttgtcgttcaggttaaacccatgtgttgccgtttttgcttttatgaacttgcggttcaagttcattgggagatcccctaattgggtctcccatacttcaacagtccaccggactattgaagttcccgtcctgatttttggtaggcaaaagggtttcgccatttgcgaatggcgactcggggcttcgccccaagaccccaccgcctttgaaaaggcgggcgaaacctttaaccgccgttgagggtaactttgctctatcgaatcaaatgcgaataatccgggacatcgtggtagcgctttttcagctccagaagcctttcgagcggaacgccttcgccctctcttctgccgcacctcgggcacacctcgtcgatgattccgttatacccgcacacagggtctctgtctacggggtggttgaccgagccatagccgatgcccatttctttcatacagcgcacgatgctttcaaatgcgtcgatgtttttgcacgtatcgccgtcgagctccacgtagctgatatgccccgcattcgtgagcgcgtgaaacggcgcttctctgcgaatcttttcataggcgctgatggggtaatacaccggcacgtgaaacgagtttgtgtaatactctctgtccgtaacgccgggaattttgccgtatttcttttggtctatgcgcacaaagcggccggaaagcccctctgcgggcgttgcgagcaaggtgaagttgaggccggtctcacggcttttttcgtccattttctcccgcatatgggagatgatctcaagccccagcttccagctttcttcgctttcgccgtggtgcttaccggtgagagcttttaaggtctcggcaaggccgatgaagccgacacttaaggtgccgtgctttaagacttcggcgacggaatcgttgcggtcgagcttttcggaatcgatccacacgccctgccccatgagaaacggataattatacacctttttgctgcactggattttgaagcggtgcagaagctgttcttccacgagcgcgattttttcatcgagcagcttatagaacgttttcatatcgcccttcgcttcaatgccgatgcgcggcaggttgatggaggtgaagctcaaattgcctctgccgcaggtgacttcctttgtgttatcgaatacattgcccatgacgcgcgtacggcagcccatgtacgccacctcggtgttataatcgccgggtttatagtattgcaggttgaacggggcgtccaaaaagctgaaattcgggaacaggcgcttggcggagcagcgcagcgcgtggcggaacaggtcatagttcgggtcgccctcgttgtagttgacgccctccttgactttgaaaatttgaaccgggaaaatgggtgtttcgccgtcgccgagccccgcttccgtagcgcggagcaggttgtgcacggtcattctgccctccggcgaagtatccgtgccgtagtttaaggagctgaacggtacctgtgcgccggcgcgggaattcatggtgtttaaattgtggacgagcgcttccatggcctgatacgtggcagcatccgtctctttgtaggcggtctttgcggcgtattccgcggcggcgcgggcagcgtcgcccgtgatgatctggaagccgttttctgcttgatggcgcggcagaaacgcgcgcagcttttcggcgtaagcttctgcggtgtgcattgtgacatcggtgccgagcgcttctttgatggcagccgtcagcgcggcggcatcggaggcgctcatatcaaaccgcacctcaatatactgcgcgagcgcacggaaatactgcttgcggtacgttttcttcacgccctccgccatagcatagtcgaaattcggcacgctttggccgccgtgcatctcgttttggtttgcctgaatggcgatgcacgcgagcgcggcgtagctgcggatgtcgttcggctccctcaaatagccgtggcctgtggaaaatccgtcttgaaacagctttagaaggtcaatctgacagcatgtttcggtgagggcgtaaaagtctttatcgtgaatgtggatgtcgccgctcgcgtgtgcttcggcaatctccggcgggatgacatatttatcgtaaaacgccttggcgctttcggagccgtatttcagcatggtgcccatggcggtatcggcgttgatattcgcgttttcgcgctttaagtcatcctcttcggacgggcggaacgtgaggttttcaaaaatcttcacgagctcgtcatccatttcgcgcaggtgctcatgctccgtgcgataattgatgtaagcgttcgccgttttggcgtaatcggcggcaagaagcttttcctccaccacgttttgaatttcctgcgccgtgggcgtacccggcagcttttcgagcgccgtgagcacatcttcggtcaattcgttcagatcggcgtcgctcatacgctctgcggcgatcctggtattggccttaaatatggcgcttttgattttccgcgcatcgaacgacaccttgtccccgctgcgcttgacaatatatcgaatcatacgtttaacttccctttccgtttctcccctgcggcaaagcctaaaagccttcgctttgcgctttctgtactttcgattataggcgcttttcctatacatgtcaagggcatatttagtgtcaaaaccactatatatagtattaggtttacataataataacaaaatataccgcgcgtcatagaagcggttttctccataacgcgcggtataacttgtgatttcatggcgttttttcacggttttcggggcacatttcggcgcggttgtacaccgtctatacccgtttataagccctatgcacgccatacggcggttgacaaaataaaacgcgtattttcacgaaattttttgccggctttttttagttgacgacggcaccgagcagtcctgcgagatacaccgcgccctccaaatcgatctttgttttctgcatttttgcaaagcggatatcggtgcgcgaaaatttggcacggcgcaggtcgcattctttcagctgcgcattgcggaacacggtctccgtaaggtcgcagccggaaagatcggctttttcgaggtccgcttccgcaaagctcgtaccgcgcagactgatgccggaaaagtcctgctttttgagcggacaatgatcgagcacacagtattcgagtgtgccgccgcgcgcggcccagccggtgaggtctgcacccgcaaaggagcagcccgagacacggcaattctcaaacgcggtgacaaacaggcttgcgcccgaaaacgtgcagttttcaaacgaacagccgcgcgccaaaacgtcgtttaagcgagaaaaatcgaacgcgcacgcagaaaagcggcatttttcaagcaaagcgccggaaaacatcgcgccgcgcaggtcgcaattttcaaacgtatagccgcgcagctcggcgtccgtgaaatcggtatcgccgagccgcgcgtttttatacgtgttctgttctaaagagaacattactcttcttccgtcacggcgatgtgcagctctttgagctgtgcctcggtgactttggacggtgcgtccatcatgacgtcctgtgcgctcttgttcatcgggaacgcgatgacctcgcggatggattcttcgccggagagcagcataaccatgcggtctacgcccggggcgatgccggcgtgcggcggcgctccgtagcagaatgcgttgtacatggccgggaacttcgcctttacatcgtcttcgccgaggcgtaccatctcgaacgccttgaccatgatctccgggtcatggttacgcacagcgccggaggagagctctacgccgttgcaaacgaggtcgtactggtctgccagaatgtcgagcgggtcaatctcgccgcgctcggccttaagcagcgtttccataccgccggagggcatggagaacgggttgtggcagaactccagctcgccggattcctcgccgatctcgtacatggggaaatcgacgatccagcagaactcgtagcgctctttatccatgtggccctcgcacgccgcgccgagcatacgacgcatgacgcctgcggtcttctgggcctcctcacgcttgcctgcggagaggaacacgagcgtattcggctcgagagacagcgcggatttgacggcttccacggtcttttcatccgcattgataaactttgcgatgccgccggcaatggcgccggattcatcgaccttgaaccagtacggcttctggccggcctgcacctctacgtctgcgcagagcttatcgaccgccttgcgggcaagcttgcagttggagaccgggacagccttgacgatattgttttcaaacgggccgaaaccgcagttttgcagaatgtccgtaacgtccttgacgcgcaggtcgatgcgcaggtccggcttatcggagccgaactcctccatggcctgacggtacgggatgcgggcaaacggtgcggaggacgcgatgttatacgtgccgtactttgcaaaaatcgacggaagaacgtcttcgatgacggcaaaaacgtcttcctgcgaggcaaacgccatttccatatccatctggtagaattcgcccggagaacggtcgccgcgcgcatcctcgtcgcggaagcacggtgcgatctggaagtagcggtcaaagcccgcagtcatgaggagctgcttaaattgctgcggtgcctgcggcagggcgtagaacttgcccgggtgcttacgcgccgggacgaggtaatcgcgcgcgccctccggcgaagaagccgtgaggatcggcgtggtaatctctaaaaagccgtgctccgtcatagcggtgcgcagagcggaaacaacgttgcagcgcaggatgatgttggctttcacttccggattacgcaggtcgagatagcggtattttaaacgctggctctcgtccgcttcgcgggagtggttgatctcgaacggcagctcgttataacgacagcggccgagcacggtgatctccgtcggcgcgatctcgatgtcgccggtggggagcttcgggtttttgctggtgcgctcgcgcacgatgcccgtaacggaaatcgtggattccttattgaggggctttacaatgttcatcatctcttcgttttcgatgacgacctgcgtggtgccgtagaaatcgcgcagcaccaaaaacgcaaagttattgccgacttcgcggatgttttccatccagccgaccagtgtgacggtctcgcctgcgtttgcaaggcggagttcgccgcaggtatgggttctcgattgtgtcatgattgatttcctctttcgttagtgtgaccgattaaaatgtgatgggcatggcgtcttcctgttcggtgacggccgtgatgtacgtatcaacaaagtcatcgttgagggagatcttcttcttttcgcccgtcttcatgtttttaagcacggcttcgccgtttgcgatctcatcgtcgccgaggacgatgctgtactgcgcgccgattttgtcggcgtatttcatctgggctttcagaccgcgtgcacacaggtcgcagtctgccgcgatgccgcagctgtgcattttttcggtgagctggaacgccttcatctgcgccgcttcgcccagagacgcgatgtagacctcgcactttgcgtcatttccgaagtctgcgcccatctcgttcatcgccatcagaatgcggtcaagaccgagaccgaagccgagtgccggtgtgggcttgccgccgacttcctccacgaggccgtcgtagcgtccgccgccgccgagcgcaaagccgaagcgcttcgaggggaactcaaacacggtgcgggtatagtaatcaaggccgcggacgaggccgggatcgatggaaaacggaatattgatagatttcagcagcgtctgcaccttttcaaagtgcgcacggcagtcgtcgcagagataatccgtgatcttcggcgcacccttggcaatctcgccgcaaacggggcttttgcagtccagaatacgcatggggttgcgctccaagcgggaattgcaggtctcgcagagctgatccttatagccctcgaaatacgctctcagcgcctttctgtactctgcgcggcaggtggggcagccgatggagttgatggagacctcaatgtcatcggcaaggccgagacgattgaaaatggacatggccatagcgatgacctgtgcgtccgccgccggttctgcggtgccgaacatctccacgccgaactgatgcagctcgcgcagacggcctgcctgcggcttttcgtagcggtagcaggaggtcttatagtagagctttaccgggtaaccgccgttatataggccgttttccagcatggcgcgcacagcgcccgacgtgccctccgggcgcagcgtaatggagcggccacccttatcttcaaacgtgtacatctgcttttccaccacgtcggtggtgtcgccgacggagcgcaggaagagctcggtgtgctcaaacaccggggtgcggatctcggaaaagccgttcagttccgcttcatccgtcataacggcttccacaagcgaccatttttcggattcacccggaatgatatccacggtgcccttaggcgcttttgtgatcaattccataaaatatccctctcattcatgaaaaataaaaaaacccttacccaaaacggataagggacgaaacaggttcgtggtgccaccctttttcgggagaaaaagcgaaagcttcccctcccctttctttccttaacgcggaaaacgcactttcgtgcggctcacgggtgtctttctctgccggatgcacgcgccgctctcagcatttgcggcgctctctgttttgtgccccatggcagatactcttcccggtcaatgccggtgtattttcaaagcatacgctttggttttaaatttacagctttacaatctcgcgccaatcgaggtcgccgcgctcgagaacatggataagcacctctgccgttgcgatgttcgtcgccacgggaatgttattcaggtcgcagagacggagcaggtttttatcgtgcggctccagtgcctgcttctgcatggggtcgcggaagtacagcaaaaggtcgatctcgttgcaggagatacgcgccgcaatctgctgatcgccgccctgtgggccgcttaaaaagcggtggaccgaaagaccggttgcttcctctacaagcttaccggtggtaccggtcgcacagagattatgccggctcaggatgccgcagtaagcgatgcagaactgtaccataagctctttttttgcgtcatgcgccgtaagcgcgatattcatgaaaattcctccctgtttataatcattcggcccctatcccaaatgtcacaacgataagggaaccgaaacaccgttcatgcgtgccgctatgcgggaaagcgccgtcatgccgggcaggtcatccgccggcacgcagccacgctgaaaagcagccgtcatttgtctatcttcgggtacgatgccgatgagccgcacgccgctttggtcgatgacgtcatcgaggtcacgcaggccgccggcgtcttcccgcccggcggaaaggctgccgaaatattcggcgttaaagcgattgatgacgagccgctgctgcggtacctcaagctctgttaaaagcctgcgcacgatggacgcatcgcggatacacacggggtccgagttgcacacaataagcgcgcagtccgccgccgctgccgccgcgcggaagccacgccccacgcccgcgggagaatcaaggatcacgcggtcaaaatagcgctttaaaagcggaacgagtctaagcatgacgcgttccggcacaagatcttcgccgcttgccggggcaggcattaaagacacgccgggcatggtcacgcacgggtaaatcgcatccgcaggcgcgcagcgccctgccacaacgtccgaactgtcgaacacgagcgcttcctctgtgccggtcatacggtccaggctgcgcaggcccgcgtcacaatccaaaagcagaacgcgttcgccgcccgccgcaaactgagaagccagcccaagcgaaacggtggattttcccacgccgccttttcccgatgtgacaacaatagcagtacccatagataatacctcattaaacataataacacaaaaatgcacggtagtcaaaagtaaaaatggctataccgcaattttatcacagcgagacaaaaacacggcggcttttttgtcgaagcagacaaatatcctccctaagcacacgtcattccgtaccctctgttaccgtggtttctgcgttttttgcctccttttggagcgtttcggcaaaataagcttcaaaaacggcctttgccgtctcttttgcggcatcgcccttgccgccgtattcgatgacgaccgccacggcaatctccgggttctcgtacggcgcaaagccgatgaacgtcaggttatcggaatggtcggcgttttccgccgtgccggtcttgcccgcaacggcaatgccgaaatccgaaaaggtcgaggccgccgtgccctctgtgcacacctgccgcatgccctcgcgcacgaccttgaaatattcgtcttcgatctccgcttttaacacgacctccggctctgcggcctctttttccaccgcgcggtcgtagtccgtgactttatttaagaaatgcgttttgtagcgcgtgccgccgtttgcgatcatggcgcagtattccgcaagctcgatcggcgtgaacatatcgtcgcactggccgatggccgcctgaatggtgaggccgtcataccaatttgcgccgtggcgctccgtatacgttttggggtcggacatgatgcccgcagtctcgctcaattcgcacccggtcttttcgccgagagcgaacagctctgcatacgtgtgcattttgtgaatggtcagcatgcggcccacgtcaaagaaaaacgcgttgcaggagttgcggatggcgccgtacacatccacctcgccgtgcacgccgaggcagcctggttcgtaatccggcgcataatagtggtacgcgccgtcgcagttcacggggtgagaggttggcgtgatgacgccttcctccagcgccgccaaggcgacaaggggcttaaaaatggaacccggcgtaaagatgccgtttaatgcgcggttgaaaagcggctggctttcgtccgcataaagctgcgtcaaatacgcatcgtccgtattgtacttttcaaggtcgaaattcgggtaggtcgcgccggcgatgatgccaccggtgttcacgtccaaggcgacaaccgcaccggcctcgcagtcttcggtcggcttcgcttcaatctgctcggcgagcgcgtttacggccgcgcgctgcacattgctgtctatggtaagccacacggaatcgcccgcttccggcggctctgtcacggtggtggaggtcactttgccggtagcatccgttgtgacgctctctttgccgtttttgccgcgcaggatggactcgaacacgctctcaatgccgctttggccgacggtatccgtataggaatagccggaaacgtttgaggcggaatacgtgttgcccgcttcctcggcggcatcgtactgctcctgcgaaatggcacccagcgtgccgatgatatgcggggccaaatcgccctccgggtattcgcgcgtctgctccacctgcgtttcaatgcccggcaaatctgcgctgcgctcacttaagagctccaccgtttcgatggaaatgtcttttgcgagcacgaacgggttcgtgcggctgaaatacgcgcactccatgccatagcgcacggacgcgatacggcggatgtcttcggggcttgtataggcttcgaggtcataccgctcgatgagcgatttcatgcactcgtctgccgtggcgctcgagggtaagtctaagatgtcttcgcttttcagcgtttcgatctcggcggtcattttggttttaaactgatatttgcccgatttgatttcgatgggaaggcgatccgtccacgggacgttcagcatttcgagcagctttacagcctccaaaacgacgacattgcgcgtttcattgctgccggaaagacgactgtatatggcattatacacggagcggttgcctgcgagcacgtttccgttacagtccaaaatttcgccgcgcgtgccggtgagctttaagtacgtcgcggaggactgtacggcctcctcttcaaacgtgctgccctctaaaagctgccactgggcaagccgcccgatatacaaaagaaagacggcagcaagcataacgccgcagaaaatatagcggccgcgtccttttttcacagctgtcgtctcccttcgttgaaaacttaaattttttgcagcttatgcagctttgacctgcgccgccgtatggcgctgcgcacgcggggctttcgcacccacgcctgcaaaccgtagcacacgggtatcgttaaaagtgtgtaaaaatagatgggcagatactttgtgacgagcgcgtacagcgtcagtgaatacccggctgcaacgtacagcgcgagccaatcgagcaaaacggcgacggcacagctccacagacccatcaataccgatgtgaaaagctgaatttgaattctggtgccgcacaggccgctcagcaaaaagcacagcacgccgaacgtgagcgcgtgatacccgaacacagccccgctgccgatatcggcaagaaacccggcgtacatgccgaacgccatagcgggtgtgcacgcctccaccatggcaatggtgagcgcggcagagagcaccgaaagcggttttacgcccatgatctgcggcagcagccccggtgtatcctgtaacaggaacagcagcaggatctcaaccgcatacaagacatagcgtatccattttttgcggttcggcacagctgttcactccttttattcatttcccttgcttgcggtctgcgcggggtcttcttcatctttgttattcgtctccggcaagccggttgtaacgtcgcccttgccgtcgaaatccgtcacgacgaagacatccgtcacctctgttacgtccacgtatggggtcaaaatggcatagtacgaggaatccgcgttgctgcgctccacactgtccacacgcccgatgagcaaatcgcccgggaacacgccgcccgcgccgctcgtggtaatgatggagcccggctgcacctcggtatctcttgtaaggtacagcattttcaccttgccgctgtttgcgaactgaatgtcgcttgtgacgacgccgctttccttgcatgatttatccgtggcgccgatctgcgtcttttcggataaaatcgaccgcacgcggcttgacgcggcgtagacctcctccacaacacctacgacgcccgtttccgtgatgacggcatcaccgacggatacgcccgcaaggctgccgcagttgatggtgaaatcaccgaacacgtcgttcgggtcgcgccctacgacgcttcccgcggctaattgcaggtcgggcatggcttttttgacggagaggatattttcatacgaagcattctcgtcttttaaggtgtagtaatccacaagctgttcgcgcagcttccggttttcctccgaaagatcgttgtacagcgctttaagctcctctttggacatgccgtccaaatttaaaaattcctttgcgccctcggtggtattcgtccccgccgtgagcaacggtgcggataccgtgccgaacacgtttgagaacacggatgttccggcgtttaagccgtacacgagcacgccgagcagaatgacaaccgcgatcattaaaattttaaaatttttagaggtgaatttctccatgcgccgcacctgcctttcgatttttatttaaagtcaaattcaatttatttttctgcggcttttaccgcgccgcgcgcgtttgcggggatatgcgctttgccctctaatgtgcggcctgcaccctcggctacgcagtcgagcgggcgctccgcgacctgcacgggcaggcccgtcgcttcatgcaaaaagcggtctaagccacgcagcagtgcaccgccgcccgtgagcgtgagacccatatccaaaagatctgcggaaagctccggcggggtccgctccaaaacgcggtgtacggactcgaacacagctttcagcggcaccaaaagcgcctcgcgcacgtcttctgccgtgacggtaatatttttcggctggccgtccgccgcgctgcgaccgcgcacctccatggagacactgccgagttcctcaagcgggtaagcggagccgatctgcaatttcacgtcctccgcagtgcgttcgccgatgagcacaccgtactttttgcgcaagtacgaaacgatagctgcgtcaaatttatcgcctgccacacggacggaatctgccacgatggggtcgccgtaggagatgaccgccgtttcgcttgtgccgccgccgatgtccagaaccatgctcgcaaccggctcgcccgtgggcagccctgcgccgatagccgccgcaaccggctccaaaatgagctccacgcggcttgcacccgcctgctttgcggcgtcctccaccgcgcggcgctccacctctgtaacgccggagggaatgcagatgacgatgtgcgggcgcgtgaacgaaccggccttgatggccttgcgcacaaagtatttgagcatggctgccgtcacctcaaaatccgcaatgacgccgtcttttaacgggcgtaccgccgtgatggactccggcgtgcggccgagcatttctttggcttttttgccgatggctaaaacctcgttggagttcgcgtccaccgccaccacggacggctcgcgcagcacgatgccctcaccgcgcacataaacgagcgtgttggccgtgccaaggtcgatgccgatatctttgatagatgttgaaaaaagagaaaaaagcgaggaaagacccgccatgatcgtagattgcagagaacccataggataagacctcccgaaacgggtaaaactttgataagcagcgcgtctttgcggcgcacggtactcatacttattcagtataacaaaacagcggcggagcttcaaccgaaaaatcgtgaacaccgccgcaatttgaaaatttattttgtccccgtgcttccgaatccacccgcaccgcggtcagtctccgtcagagatgtgacctcctcgatcaccggcgcgaaatacggcataataatcatttgcgcaatgcgctcgcccggctgcaccgtgtacggctccgcgctgagattatgcaggccgatctggatttcgccgcggtaatcgctgtcgatgacaccgacaccgttcgtgacatgaatgccctttttgatgccgagaccgctgcgagtgaaaacgaagcccgccgtgcccgcggggatctccgccgcaagaccgctcggaaatacgcagcgctcgcccggctcgatcgtctgcggggtgtcgatacacgcgcacaggtcatagcccgcgctgcccgccgtcgcctgcttcgggatgatcgcaccctcgcgcacacgcatcagttttaaaaccatattttgttccattttttgctccttgtctatatacagtatcccaaaaatccccgtttttcacactttttcccggttttccctcattgtggataactgtttccacagcgctgtggaaaatgaaaaacggcttatttctgcggtttttttgagttcacagtctgttcaaaaagaaagttctaaacactttccaccgagttttccacaatcaaagcacgccgcggaggaaaagtcctcgggtgcagtcggaatgcggcttttcatgacgaacggcagcgtctaaaatcgcctgcgtttccacggcgttttccacagagaagcgcaaaacaccgaaatcgacgtttgaaacggggcggtcaaagagcacgagcggcacgctgttaaagacctcggaatacacggtttttccctcaaaacgcgtgcagtgcacgggaaattccacgcccttgcggtcgcggattttgcccgcatgcttgcagtttaagcagcccttcggcgaatttgcaagcgggcagttgcgcgtgagcatcaggggctgacggccgtagagcaaaatgccgcgcggcagctcgccgccaaggccgcgaatttcgtcgccggtcagttcaaaggaaagctcggtatcgtctaagccgaattcttcaaaaaagcgcaggcattccgtattgaatacattgagcgaaaatccgccgtgcgcggacacaccaagttccttgcacagggcgagcgcaccgagattgccgcagtaaaagtgcgtatcgcccatggctttgcacgctttcatgcgtgcgcgcaccgcgttttcgatgccccacagcgcgcgcggcagggcaagaattacctcaacacccgcgtttttgcagcgcgtgcgcgtcgcttcgtcggcatcgagcggcagaatgaccgcttccagcatggaaatgttttccggcacctgcgcgcagtctttgaagaacgcgcggagtttaggccggccgctttcaccatgtgtacgcgtatcgagcggaatatctttaaacgatacggcgggcttttcgcggcgctgttcgccgagcttttccagtgcttcacggcgcagaccgttcaaaacggaaatgggcaatgcggttttttcatcggtgtcgatctgcaccgcttcgcacaaatacggcgtgccgccggtttttcttaactgctgctcccagcgttcggtgttgacgggcagcttctgcgcgatttcgcatacgaagtcttccgccgttacgaccgcttcgttttcgccgtccgagactgtgacgcgcgggttttcgcccgcaaaggcgcttaatgtgaatgtcaccggcacacgctgcgcttcgtttttatataaagtatgcagctgcgcgaacacggcggaatttgcgctttccacgtcttcctttgtgcgggtgccgaacataatgcgtcctctgtgagcggacagatagccgtccgtaaagccggagcgcgagaacaccgcgtttaaatgttcgagcaggttttccggcacaggctcgccgtctgccgcttttcggcacgccgcgactgccgccgccacgtattccggccgcttcatgcgaccctcgatctttgcggaacatacgccggcattgtgcagcgtttcgatgtggtcgatgaacgacatgtcctttaaactgaggtcgtgccccgtgccaccgggcgcggcaaacggcagacggcaggtttgagcacagcgcccacggttgccgctgcggccgccgagcatggcgctgaaatagcactggccggaaagcgacatgcacagcgcaccgtgcacgaaagcttcaagctccacatcggtctttttggagacttcttcaatttctttcaaagacatctcacgcgccaaaacgacgcgggacgcaccgagttcctttaataaggccgcgccgccgggcgtgtgcaggctcatctgggtagaggcgtgcaaaggcatctcggggcaggcttcgcgcagaatattaaacagacccatgtcctggatcaaaatgccgtctacgggaacagaacacaggaacttgcagaaatcaagcgcttcgggaagttcgtcatctttcaaaagcgtgttaaccgtgacgtacacgcgcacattgcgctcacgggcaaaaagcaccgcttcccgcatttcttcacgcgaaaaattcaccgccgatgccctggcggaaaacagcgagccgcccatgtacacggcatccgcaccggcgaacaccgccgctttcagggccgcgggattaccggcgggcgcgagcacctcaatcttcttcgtcttcacgcgcggtctcctttacgtctgccttttcgaaaaagctcacaagccccgtttcgtcgccgtaatcgggcagcatgggattgcgcaggtcgatgggcggcaggtcgagcggttctgcagctgccgtgtgcgctgcgttttgggcagcggctttcgcttcttccgcttccttttccgcagcttcggcgcggttttcggcaaggcgcagcttttcctgcaaaacgccgagcttcatttccgcttcggaaaggcgggccttcaggccgtccgcaccggcaaattcctttgtctttgtgcgcagggcatctgcttcctcgcgggcctgattcaaagcggcctccgtgcgggaaagctcctcgctcaggttcatggccgcaatgaccgccgctttctctatggtcgcgccgtaggcgttgtttaaaacctcttccatacgcacgcgcacacgctctgcgatggcttctgcaccgtcgcggtccacatcgccggaaacggtgacgtccacgccgcagatattcagtttgaatctcgttttttccattgcacagattcctttccccgcgccgattttacgcaggttatactctgttctgcattatataccaaaagccccgccttgtcaaaaaaagcgcgcaagacgggcgtttcggcggttttctgcaaaatctgcacagattttacacaaatgtacttgtaacccgctgttttcccctatacaatagtatatggtgtgtgtaaggtcgaaaaaaggcaggcgcgctgcggttttcggccggtttataccgaaagctgatattttctgtcgaaactatacaaagccaccgctttaatttctgcttatccgcccgctattggtcttgaatttttcataattttagtatataatgggtataaaccatttgttttttaatcaaaacgcatttaattttgtgcatatagcacaaatctggcgtgtttttcacgcataacacatggaggacaaagaatgaattacaagatgacccccgcgcaggtccagagcgcaatccgtgagaagctctcgcacatttacggcgtttccgcaaagaacgcttccgacgatgaattctacaaagcatccgcacttgtggtgcgcgacctgctcgttcgcggccgcgacgaatttgtacacgaagctgaaaagcaggagacaaagcaaatctactacctgtgcatggagtttctgctgggccgctccctgaagaacaacctgtttaacctcggtctcgaggacagcttccgcaaagcactttccgaaatgggcgtaaagctcgataacctttacgaacaggagccggacgccggccttggcaacggcggcctcggccgtcttgccgcctgcttccttgacggtcttgcaacacagggctacccggctatgggctattccctgcgctatgaatacggtattttccgccagaagcttgttgagggttggcagacggagctgccggacttctggcttccgggcggcgaggtctggatgcagaaggtcgacgaaagcgccattgaggtgcacttcgacggctacattgaagagcagtggcatgaccactaccattccgtacgtcataagaactataaccccgttatggcgatcccgtacgatttgtatgtttccggcatggacggcaagggcatttctgtgctgcgcatctggcgtgcggaagccaacgaatttgatatgaagctcttcaacagcggcaactatatgcgcgctatggagcagaaagctatggcagagaccatcacaaaggtcctctatccggaagataaccactacgagggcaagagtctgcgccttgcacagcagtacttcctcgtttccgcctccgtacaggacatcgtacgccgccacctgtacacgcatagctcccttgatgatctgccgaagcttgcggcgatccacctcaatgacacgcaccccgtgctcgccatcccggagctcatgcgcatcatgctcgacgaatgcggctacgagtgggacgcagcttgggatattgtgacccgcaccattgcgtacacgaaccacaccgttatgagcgaggcgcttgagtgctggagcgcagacctgttcaaatcccgtctgccgcgtatttaccagattgtggaagagatcaaccgccgcttctggattgagatgcgtgcaaagggcgtggacgaaggcaagatctggcgcatggccccgctgaacgacggctatgtgcgcatggcaaaccttgccgtatacgcaacacacagcacgaacggcgtttccgcgctgcacagcgaaattttgaaggacagcgtgttccacgacttctacaccgagtggccgaataaatttaagaacgtcacaaacggcattgcacatcgccgctggctgaaccagtcgaacccggagcttgcttcccttatcaccgagttgacgggcgacggcttcatccacgatgctgctcagcttgagaagctgatgaaatataaggacgatacctccgtgcagaagaagcttgccgagatcaagctgcacaacaagcagcgccttgccgagcacgttaagcgcacgcagggccagatcgttgacccaaacagcattttcgacgtacaggtcaagcgtctgcacgagtacaagcgccagcacatgaatgcgctgcatattctctccgtataccagtggttgctcgaaaacccgaacgcggattataccccgcacacgttcttcttcggcgcaaaggcagccccgggctactatttcgcaaaagaaattctccagttcatcgtctgccttgccgataccatcaacaacgacccgcgcgtcaaccagaagctgcgcgtcatcttcgttgaaaactactgcgtatcctgggcagagctgctcaccccggcggcggagatcagcgaacagatctcccttgcgggtacagaggcttccggcacctccaacatgaagtttatgatcaacggcgccatcaccctcggcacgctggacggcgcgaacgtggaaattcacgacgcagtgggcgacgacaacatcatcctcttcggcatgacgacgcccgaggtcaacagcctgcgcgcttccggctacaacccgagaaaccagtacgagcacaacgacatcatccgcaaggcgatggatgctctcggccagggctttaacggcaagacgttccagaacctgcaccaggcactcctcaacgtcgaccagtacatggcgcttgcagactttgcttcttacagccatgcacagcagaaagccgaacagctttataaggaccagaccaagtggaactctatgtcccttgtcaacaccgcaaaggcaggcattttcgctgccgaccgcgccatccgcgattatgcgaacaccatttggctcgcaaagccggtcgagacgaaaaagaagtaatatcacgtaagtttatgtaaaaagcagggcgctgcggtcgtagtgccctgcttcttcatgcaggagagtttaccgatgacgctatttaattccagaaattccatacaccgcagcccgctgggcgctgtggcagacggcacgcgtgtgcactttaaaattacgctgccgcgcgacatgcagtgctctgcctcctaccttttggtgcagcacccggataaccgcattgagtgccttgatatgttctggtgcggcatgaacggcaatgactacgattggtgggaatgccactttacgccgcagaaaacggggctttacttctatcattttgagctgcgcacatcgcgtgggcgctctgtccttaaaaaggacctcggcggcgaggcgcgcgccggtgcacgtgaagactggcagctgaccgtgtacgacggtgcatataaaacgccggactggcttgcgggcggcattttgtatcaaatcttcccggaccgttttgcgtcctccggcaaagcgaaagaaagcgttccggcagaccgcacgctgcatgaaaactggcttgaccagccggactggaagccgaacgcacagggcattgtgacaaactcggattttttcggcggtgacttaaagggcatcgaggaaaaactcgattatttagcgtctctcggcgtgacctgcatttatctgaaccccatttttgaatcgcactccaaccaccgttacgacacggcgaactatgagaaaattgacccgctgctcggcgatgaggaggacttccgctcgctgtgcgcggcggcgaaagagcgcaacattcacgttttgctcgacggtgttttcagccacacgggcagcgacagcatttattttaaccgcgagggccgctacggcgatggcggcgcgtaccgctcgcagtcttccccgtattacccgtggtacagctttcggagctggccgaacgactacgaatgttggtggaatttcatcacgctgccgaatgtgcgcgaggaaaatcccgcgtatgacaactatatcaacggcgaagacggtatcatccggcattggcttgaggccggtgcttccggctggcgcttggatgttgccgacgagctgccggacggctttattgaccgcctgaaccgcgccgcgaaagcgcaggatgaaaacgccatggtgctcggcgaagtgtgggaagacgcctccaacaagacggcttacggtgtgcgccgccggtatctgctgggcgggcagctggacagcgtgatgaactacccgtttcgcgatgcaatcctcgggtttctgctcggtgagcatgcgtcgctcattatggatcgcattgagaccatcgtggaaaactacccgccgcaggtcttacgcattttgatgaaccacatcggcacgcacgatacggagcgcgctttgacggtgctcggcggcgaaccggcgggcagccgcggccgcgtgtggcaaagcgcgcacacgctctccccggagcagcgcgaaaccggccttgagcgcatgcgccttgccgcgtttttgcagtttatgctgccgggcgtgccgtgcatctactacggcgacgaagccggcatggagggctaccgcgatccgttcaaccgcgcatgctacccgtggggacacgaagatgaggaccttatcgcatggtaccgctacctcggcctgctgcggcaggagcacggcgacattttaaaaggcggcggcctgcgcagtgtttatgcacacgacaatgtgctttcgtttgagcgctatgtggaaacggaaggcggcgaggacgcgctgttcgttgccgtgaaccgcagcatggaaaacgcggtcattccggggctgcatcttgacaatgcagagtttattttcggcgcgccgtacccgaaccccgcaggcggcgatttcaagctgccgccgttcggcttcactttgctgcgcatccaccgcgaaaaaacggagaacggtgaaagctgaattttccctttctgcaaaatttttgcaaaattgaatttacacgccgttaccggcgggcttctttccttgaagcccgcttttttctatgctacaatagggttaacataatcgtcggatgggtgccggcgaaaaggggaaaagaggaagactgtatgatccgcattctgattgtggaagacgatgaaaatatctcgaaaatgctggccgccacgctctcgatcggcgactacgaatacgaccgctgcgcagacggcgaagaggccgtacagaccatcctaaacggcacgtatgacctcattttgctcgacgtgatgctgcccggcatggacggctttgccgttttggagcacatccgcggggaaagctgcgaaacgccggtgattttcctgacggcgctcggtgcggtggcggacaaggtaaagggtctgcgcggcggcgcagaggattacattgtaaagccgtttgagcccgtggagcttttggcgcgcattgaagtggtgctgcgccgcgcgggcaaaagcgaaatgcacctgcgctacggcgatattcaggtggacattgaaaagcacacggcgctgaaaaacggcgtgcccgtggcgctgacgccaaaggagtttgacgtactcgtctttttcatgcgcaacccggacgttgccatcacgcgcgagcagctgctctcgaacatttggggctttgatttcaccggtgaatcgcgcagtgtggacattcacgtgcagcaggtgcgccgcaaaatgggattgcagggcaagctcatcaccattccgaagctcggctaccgcttagagcgccgataagcgtaaagggagtcttttatgaagctatggcaaaaaatatcgctcattgcgctcgtgttcgtcacgctcgccgtgcagctcacgcagttttacatactggatagtcactttcgcagtgccatagcccgcgaggtcaattccgccgcttccgcacattcggcattggcggcttcgctttccaaccacgcggcgtatgagcgtttaaaggcgaatacgctgtttttgagcaccgatcagctgacggacatgctgaaggataccattacgacagacatttccaccgcggacgtgatagaagtgaaaaagggcggcaagaccatcacagcggtcggcaccgaggtcttggacggcgcttcgtatgatttagcttccgtcaagccgaacgatgccattacggacggcaaaacggtgatcttcgacgccggcgaaaagacgtacctcatggtggtctccatcatcaagctggaagccatgtcgtatgagctgcgcacggtgtatgacgttacgaatgtgtatgacgagcacgacgccaacctgaacaacgcgcgcatgtgggggctttgctgcggcggcggtatttccgtactgctgctcatttccgtattggggtttctgcgcccgttaaagcgcgccgtgaagaccatcggcgcggcggccgcgggcgactacaccgtgcgtatgccggaaaagggcagctcggagctgaaaacgcttgcacacagcatcaacgagatgaccgcttccatcaacgagcgcgaggaaaagctgcgcgatattgcagaaagccgcaagcgctttgcggacgccatggcgcacgagatgaaaacgccgctgacgagcattttgggctttgcggatattctgcgcatcaaaagcgttgtcacggacgagcagcggcgcgactttgcctctgccattgtggaagaagccaagcgcttgcgcgggctttccgcaaagcttttgacgctggcttctaccgataacaccccgctcgattttgcggatattcccgtggcacagcttttctctgatgtgcacgccaccatggcgccggtgcttgggcggcgcggcatcaagctgacaacgctgcacaaaaacgccgtgctgcacattgaccgcgagctgtttttatcgctgctttacaacctcatcgataacgccgcgaaggcttccccggacaattccgaaatctggctcattcagtccgagctggacggccacacggtggtctccgtcatcgaccgcggcatgggcatgaagcccgataccgtgcgccgcgcaacagaagcgttctacatggaagacaaagcgcgcagccgcaaggcaggcggcgcgggcctcggccttgcgctgtgcgacgacatctgccgccgccacggggcgcggcttgaaattcgctccacctaccagaagggcaccacgattatcattcacatgaatgtagcgcccattccgaaaaatcaaggcgacgagctggaagcacttttgcagaagcgcccgccgcgcgagaaaacacgcgataaggcgcgtgaaaaagaacgccagaagcgcaaaaagcagcgcgaaacccgctacaaaggaggcagaacgatatgaaacgcaacatttttctctcggttttcctgcctttgttcctttgcgccgccattttgacgctcggctatttctcccccacgctatttagccgcgtgatgccgaactttaaaaacaaggaaagcgccgcgcagattaccggcgcggaaagcccgctgtatttggaagacccctccagccttattctgccgccgtggaatgatattgatgattctaaatcacagatgtacgcttccgataaccagtctgttccgtactccataaaaatgcgcattacagacgacctacaaacatatgccgaaagcaccggcgacagtcgtttctatacctataacaaccaactgcaagacccttatgtttatattgatatgtccgatctttacgtgcgcagcattattgaaccttttttaaagggatgcaccatcaatgacaacatgcagttttccggctatatgcacacgtatgacccaaacgataatttttccacgctgccaaaatacatttacgcgcagaatgtgacggtaaaaaccaaagaaggcagagatttccttgtggatttcgccttcactcccatatccggcattccgctgtatgtacatgctacggaaatagatgccgcaacggctgctttcccggaggacagcgagtttttcaatcttgtcgttactgcactcttcgtcgctacgcacgcagaagcagatgcagacgaattcacaagtcaggttgaaagctattatacgtcggataaatacacctctcttatcgcctctttctacgattttcccgcgcatttattctcttttccgtctgcgaccccggaagaagattggcgagttgaactgcttgtgggcttacgagacaacatgtatgacatgctgtacaactttgtatacagtattgattccgcctcctccatcgattaccgcgatgaatctctgatcgttctgcgtaatgagatcggctacaccatgacggttttttacgatgccatttccgagagcatcaccggttacggtttggatccttccaaccccgacgtttaccgttcggagacctttttatccggtgaaagcacctatcaagaagcttacgtttacgacggctgactccctctactcttaaaaatctaaaagccaaacacccgtcccccgaaattttgcaacttttttgcagtttgcgggggacttttttgcgtctttttcggtatagttaaagcagaaagaggagaggggcgaatgcatgaccgatataaacagaaccgcgtgcacattttcgcgccccgcgctgaacgcaaacaccttaaagctcattgcggtcctcgccatggtgctggaccacgccgccaccgtctttttggcagataccgcgcccgccgcgctgtttttccatgccgtggggcagattgccgcgcccatcatgtgctttttcattgcggagggctacacgtacacgtcgaatttaaagaagtacctgctgcggctgtttattgcggcggtcatctcccatgtgccgtatgcgctgtgctttaaattcacggtttgggagttctggtacgtgacgggcgttttgtgggggctctttttggggcttctcgccgtcacgctgtggaaacggctgcgcgcgcccgtttgggtgcggctgcttttgctcgggctgtgctgcctgctcgcctaccccgcaaactggaattacatcgccgtgctgtggatcttcggctttgccgtctttcgggaaagccccaaaaagcaatgggcgtttttcgggctcgtcacgcttttgtatgttttgcagtatttcgtctacggctctacgctgcccgtgtggctgaggccgttcgtactgctgtgtgtaccgcttcttttatgctacaatcacacgcttggtcgccgaagcaaagttttgcagtggggctactacctgttttaccccgctcacctgcttgtgctcactctgctaagagaaattttcacccggttataaagaagttttaaaaagggggatctttatgcaaacgcacaaaaatgtaaatttggcacccgaaagcttccgacacagtgctgtgccgcgccgcctaaagcaccgcgcacggcgtcgcagacgcattttgtgccttttgcctgtgatactcgtgttcggcgtgctcgccgcggcgctgctgcgctttacgcccgcgcttgcctacgccgatattttccccgcgcaggcaaccacccgccgcattaaagacgtgccgtacatttcgcagctgccaacgcttcccacgggctgcgaaagcgccagcgccgccatgctgttaaactactacggctgcaccgtcacggcagaggaatttgcttcctattacctgccgacgggcgacgcgccgcacacggacgaaaacggagagcttatcggctgcgacccatgggaggcattccccggcgacccgttttcggaaaccggctggggatgctactccaccgtcattgagcgcgccatgaacgagtttctcacaaacaccggctaccacgccgagcgtctgagcggcgtgccgctttatcgcctaaaaagctatattgacaacaacaccccggtgatgatctgggcgactatctgcatggagccgccgattgaaagcgacatttggacggtgccggagaccggccgggagattacgtgggtctaccccatgcatgcgctcgtccttacgggctatgacgaaaacggctactacttcagcgaccctctcgccgggcaggacatctactacggcaaagacagcgtggaggtcgcctataccgcccttttcgagcaggccatcatcctgacaaactgaatacaccaaaacttacttcctccgcatacaaaaatccccgcacaggcttttaaacagcgctgtgcggggatttgcggtttataaggttagattgactccacgtcgatctcgccgtccttttcggtgacgagaataccggtgacgttgccttcgcctttctcgacgatgagggacgcgattttgtcttccacggtgcggcggatggtgttgcggatgtcgcgggcgccgctcttgccgcctgcggcacgatgcgcgatgttcgcgacggcttcgtctgtccagcgcagcgtgatgccacgctcattaagcgtgccgacgtactcgttcagcatgagcaccgcgatcttcttgtagtcctcctcattcagcgggcggaagacgacgatctcatcgatacggctcaggaactcgggacgcagaaaatcagacagcgcgcgcatggccttttcgcggctgatgtccgcgctggtgcggttgaagccgacgagcgcttcgcggctgttgctgcccgcgttggaggtcatgacgatgacggtgttctcaaagttgaccgtgcgaccgtgcgcatccgtaatgcggccttcgtcgagaatttgcagcagaatgttcataacatccgggtgtgctttttcgatttcatcgaagagcagaacggaatacgggcggcggcgcaccttttcggtgagctgaccggcttcatcgtagccgacatagcccgggggcgaaccgatgatcttcgagaccgagtgcttttccatgaactccgacatatcgaggcggatgagcgtctccggggaatcgaacagctctttcgaaagcacgcgcacaagctcggtcttaccggtgccggtggggccgacaaagatgaacgaggccgggcggcggcgcgggttgatctgcacgcggctgcggcggatggcggcggaaacagccttgacggcctcctcctgccccacgatgtgctcgctcagcttttcttccaggtgggcaagcttgccgagctcgctctgctcaatctttgcagcgggaatgcccgtccaaagctcgatgacatacgcgagatccgcttccgttaccggcgcggtgacttcgttcgggtcaaacgcggcaagctctttttcgagcgccgcgactttatatttcgcttcggcaagcgcttcgtaatcgacattctctgcgccctcgatctcggcttccgccttgcgctgcttttcgagcttcaaatttgcttcttcataatccgcaagctttttgttgcgcagcgcggcgcaggcgcatgcttcgtccaacaaatcgatggccttatccggcaggtaacggtcgctgatatatcgctcggaaagcacgacgatgcgcttcgcaatttggtcggaaacgcgcacgttatggtatttttcgtagtaatttttgatgccgcggatgatatccgttgcgtcgtcgatggacggctctgtcacggtgacgggctggaagcggcgctccagtgcggcgtctttttcgatgtacttgcggtactcggagaacgtcgttgcgccgatgacctgaatttctccgcgggacagcgcaggctttagaatgttcgccgcgttcatgctgccctctgcatcgcctgtgccgacgaggttatgcacctcatcgatgaagaggatgatgttgccgtcctgcttcacttcgtccacaagtcccttgatgcggctttcaaactggccgcggaactgcgtaccggcgacgagcgccgtgagatccagaagctgcacttcttttttgcgcagcttcgcgggcacttcgcctgccgcaatgcgcagggcaagcccctctgcaacagccgttttaccgacgcccggctcaccgatgagacacggattattctttgtgcggcgggacaaaatctgcaccacacgctcaatctcgcgctcgcggccgatgatggcatccagctcgccgtttctcgccttcatggtgaggtcggtgcagtacgccgcaatgtgcttacgcttcgatttgtggaagttctccttctttttcttgtcattcggctggctttcgcgggttgccgactctgtgccgtcaccgtttgcgttcataccgaattgacccagcagttcggacgggaacggcaccgcgccgcccggctcaaagctgccgtcgtcggacatcgacatcaaatcgttcatgctttcggtcatcgcctccagctgctcctccgtgatgcccattttctccataatatcattcaccggcttaatgccgagctcttttgcgcagacaaggcagtagccctgcgtggcgttcatatccgttgaaggggaaacgaacacaaccgcaggccgcttcttgcagcgtgtacacatcatcatagacattttcctttccggcgcagaccgttagtttttcggtgtgcgctctttctttgcccgcatttcttcgggcaggttcaaatcgtatttgccgtcggtcgatctcaaaatttcgcggaacacgccgaaatatcgaatgaacgtgtacaccatgaagcccgccgtgatgacgagcgccgtggtggacgcgatattgaacgtgctctcggaaaccttcataaagccgtccatgacgacgatgagtccgatggcgatataaaacagtgttgtggagaccttgccgtaccactttgccgcgcacggctttttgccgtttttcagcagatagcatgcgccgcacaacatgacgagctcctttaagacgagcagcgccaaaagcggccaaatggacgggtagtgcacggcgatacaaatggccaccgtgccctgcgtcagcttatcggctaacggatccagcattttgcctaattccgtgatctggttgaagtgccgcgcgatcatgccgtccagcgcatcggaaaggccggaaagtcccagtgcgacgatggccgctgtgaggttgcctttcagaaaaaaatacgcaaaaaacggaatgaccaaaatgcggaacacagacatggcgttcggcaccgttaaattctgattgatgggtttctttgtcttttggcttttggcatcagacatagtgtagttcctttcccttacgaatttccgaatctccttttagccgctgctcactgcattaagtggtaagcggggttaaagctgccaagcagcttcaaaagcatagaggtattctcaaacgcctgcacttttacctgctgcgctgcgctcagcatgggcacaaatacctgcgtacacgcgaggacgacccacaaaatgagcacgagcatcagcacatcgaatactgcgccgagcgcaccgttgatgccgcttaagaccggcagcgagaaaatgcccgttaaaagcgttgcaacgcctctcagtaccacgatgaacaatacgaatagcaccagcatgacgaacacgccgatgacgttgatgagcatggggctgagtgcatccgtaatggcctctgcgatgctgtccgtcttatcctgcacctgcgccatgatactgccctgtgtgatgccggcagcctcgagcgcgcgctggataagctccgggaaggcatcgaaaacggtgttcacggcttcgcccgcgccaagccccatgaccgccgcagagatcttctccacaagcgaggggcgaaagaacgttgtgaagatccactctgcaacaggactgctcaaaagccccgccgcaatcatcgcgatgagcgcgccgcagaaatcaaagcatgctctgaaaaatcccttttttgcaccgatgacggccgcgatgatgacgagcaccacaacggcaatgtcaaatatccatcccaataaaaacactctcctttttccggcacgcctgtcgcgcgccttgtgcgatacagtgattataccacattactctgtttgcgacaatgtattatcggcctcgatcaccttaagattttctttccgaatctcgcgcacgccgagcagatacacggtgctttcgtccgccatggcgatgctttttgtatcggccggcacattgcaggcggcttcctgccgcccggtcgtgaggtccgtggacacaacggagcttgaaagcagcgccgccaccttattgcccgctgcggaaagccacacggcgcggccagaaaggtcgctttccacgggctctgcgctgtcacggaaaatgagcagcgtgctgtcgccgccgtaagcatagttggaaacggagaccaccgcgcccgaagggatgagcgtgtaggccgtcacggtgcggccatcatacgcatacggcgtaaagttatagcccgtatcgctgacgagcgtttccgtgtcgccgatagccgtcacgcggccgctgcggttccactgcacggcaaaaatcagattgccgtcgctttcgtactccgctatcggttccgtttcggacatatccagcaccgtaatgcgcgaaatgagcgtacctgcgtgcgtgatggtgcttgccaccgcggctcttgtgccgtccgtattcagtgccaccgccgtaatgtaggaatccgcaaagctatatttatactgcaagctgccgtttttgttatatacgcgcagctcggaggcatagtccgagggctgcaccgccagcgcaaatttgccggaatcgcaaatgacgccggtcgtgatactgctgtcgctcgtgccggaaatctccgtgccggaggacgtttccacacggtaacccgtgccgccggcgttatacaaaaggtagcgtccactcgcttcggagaccgcggggtcgttgtagctgtggcgcgcagagaacatctcctttgcggagccgttcagaaccgtcagcgccgtgtcgctcacaacgtacaaattgccgtcagccgcgccgaaattgcccgcaagcgctgtgctgccggtcagctccgccggatagccgtcgccaaagccgaagccgactgcctttgtgcggatccagttgccgatgttttccggcgttaaattatctttattttccaaaatgataagcagcactaccgcgatgagcagcgccgcaatgatgcggtacaaaagcttcgatacgcgcggctttttctcttccgaaagcgcagggtgttctgtttcatccggcatatcctgcacaggcagtgcttcttttttgcgcagcgcgtgctttttttccgcttcatgcttttttcttgccatacttttctcccttattccgcgttataaaatcagaatacagaacatttatccaaccgaaccgcaagcattatatttgcggtttataaaacactttttctaaatacagaccacacgccggggcggtcggccccgcaagcttgcggtttttcccctcgatgatcttcgggatgtcctcggggacaaagcgcccctgctgcacggcgagcaaagtgcccgtcatgatgcgcaccatgttgtaaaggaacccgtccgccgccacggtaaagcgcaccatgtcgccctcgcgcgtgacggagctttccgtaaccgtgcgggtaaagtcccccatgtcacggttatcgagtgtacagaacgaagtgaaatcgtgcgcacccaaaaagtgctgcgcggcttcgttcagctttttttcatcgatatggtggtagtagtgcagcgcgcgcccatgcagaaacgggctgcgaatggggttgttccagatttcatacacataccgttttccacagcaggagtaccgtgcgtgaaaatcaagcggcacttcttcgcaggaaagcacagcaatgtccggcggcagaaaatgattgagtgcgcccaaaaggcgctccggcgggatattgtgcgaaagcttcatgctcagacagaattcccgcgcgtgcacgccggtatccgtacggctgcacgctttgatgtccggctgcgtatgcaaaacctgctttaacgcctcctgaaacaccccttgcacactgcgggcgttttcctgcacctgccagccgtggtacgcgctgccgtcatattgaattttcagcagcaggtttcgttccatagtttctcctcaattttatcgcacaatggcggcaggcagcaaaatgttcactgtgatgaacgccgcaaggtacaaaacgcacacgataagcgtgatgtaatctacttttgaaaggtgcagcaccttcattttcgtgcgcccctcgccgccgtggtagcagcggctttccatggctgttgcaaggtcgaacgcacggcggaacgcagaaacaaacagcgggataagcaccggaatcagcgccttgatgcgctgcatcagaccgccgctttccatatctgcaccgcgggccttctgcgccgccatgatcttctcggtctcttcgaggagcgtcggcacaaagcgcagcgcgatcgtcatcatcattgcgaattcatgcaccggcacatgcagcagcgccagcggctttagcaggcgctcaatggcgtccgtcaactgcgtcggggacgttgtgaacgtcagaatagagctgatgaggatgagcaccacgatgcgcacggcgatcatgatgctgttcacgatgccgtttcgcgtaatgtgaatgaacccgagcgtgaagatcgggtcgccggtgccgtaaaacaaattcaatacgccggtgaacaccacgatgaacaaaataggcttcatgctttttaaatagagcttcagcggtactttggaaagcaccacgccaagcagactcataagaatcgtcgcgccgagcgtgacaaaattcttcgagcagaaaatgagcacgatgaaatacacggtcaggcacattttaatgcgcggatcgagccggtgcatgacggacttgccggggaaaaactgccccatagtgacatcagatagcatggtttttgtcctcctctttcctttttttgaggagcggcaaaagctccatgacggcttcgtctacatttaaaaccgtctcgctgaccggcaggcccattttgcgcagacggcgcatgatggacgtgatctgcggcaggcgcagacccatcggctccaaaagctcgccgcgcgagaacacggcgcgggtctcgtcgtacatttcggcatgggcgttgttcatcacaagcacgcggtctgccacgcggccgatgtcctccatactgtgggagacgagcaaaatggtgttgccgcgctggcggtgatattcggagatctgcgctaagataacatctctgcccttcgggtcaagaccggcggcgggctcatccaaaatgagtacctccggatccatggcgatgacgcccgcaatggctgcacgacgcttttcgccgcccgaaagctcaaacggagatttctccaaaagctcaggctttaagtctgtaaaatgcgccgcttctttggcgcgcttcagtgcttcttcatcggaaagccccatgtttttcgggccgaacatgatgtctttgatgacggtctcttcaaacagctggtattccgggtactggaacaccatgcccacctgaaaacgcacgcggcgaatttccttcggctttgcccaaatgtcctcgccgtttaaaagcacctgcccgcttgtggggcgaatgaggccgttgagcatctggatcagcgtggatttaccgctgcccgtatgcccaatcacgccgacaaacgcgcccttttctacggaaaggttcacgttttccaccgccgttttttcaaacggtgtgccgacgccataggtatatgtgagatttttggtttccaaaattgccatcgattttcctcgtttcctctgccgggtgcaggtcctttcggttcttgccccgcacaaaaaacaaaatcccttttatattcttatcccaattttaaatactccgcaatcgcttttacgcactcgtcttcattgagcggcgtgccggaaatgctgcacccggcggcgtttaagcggtaaataagctccgttgcctgcggcacgtcgagcttgtggcgctttaaaagctctacctgcgcgaacaccgtgcgcgggtcgccgtccgtcagaatgttgccgccgtccatcaccaccacgcggtcggcctgcacggcctcgtccatgtagtgcgtgatgagaatgacggtgatacccttttcgcggttcagataccgaatagtatccataacctcctgtcggccgcgcgggtccagcatggcggtcggctcatcaagcacgatgcacatggtctccatcgcgataacacccgcaatcgcgacgcgctgcttctgaccgccggagagcttatgcggtgcatggtcgcggtactcgtacatgttgaccgctttcagtgccgcatcgacacggcggcggatttctgcgggctcaataccgaggttttccgggccgaatgccacgtcttcctcaacaatacccgcaacaagctggttatccgggttctgttgcacaaggcccacgcggcggcgcacgtcaagctgcgtttcctccacggcggtatcgatgccgtccaccgtcacggtgccggaggtcggcaccagcataccgttaaacagcttcgccatggtggatttaccacagccgttgtggccgagcagcgccacaaacgaacccttttcaatatcgagatcgacgccgtgcaggacctcgccgctctcttcgctgtatgaaaaatgcaggtctctgcactcaataaacgccattttatcccttccgtttcaaaaaagtcccgttataccggctcgcccgaccagattgccgtgctgccgcagggcagaacaagccccgtttccgtcaccggcaagccgatttcatctgcggaaacatagccgccgaacttcgggcgcagcaaaacgccgagcagatacgccataacggacggagaaagtcccgttgtgtacgaattcaaaataaagaacagcggatcgtccgtcaagaccggcacgcacatttcaacaagaccgtaaagctgttcctcaagcttccacacctcgccgccggggccgcgtccgtaggacggcgggtccatgatgatgccgtcgtaatggttgccgcggcgaatttcgcgctgcacgaatttcacgcagtcatcgacaagccagcgcaccgggcgctctgccaaattcgatgccgctgcattttcgcgcgcccactgcaccatgcccttggaggcatctacgtgcgtgaccgtcgcgcccgcttccatacacgcgagcgtcgccgcgccggtgtagccgaataagtttagagttttaatttcgcgctcgggatttttctcctttgccgcgcggatgcgcgccgcggtgtaatcccagttcacggcctgctccgggaaaacgcccgtgtgcttaaagcccatgggctttaagcggaacgtgaggtcgccgcgcgtgattttccacacgtccggcagctttttataaacctcccatttgccgccgcccgtagaggagcgcttatagcgcgcgtgagcggaacgccaacggggatcttttttctccgacttccagatgatctgcggatcagggcggatgaggagaatgtctccccaccgctccaaccgctcgccggagccggtatcaatcaattcatagtctttccagtttgcagctctcatcagaccaattcttccttaatcacttcagaaatatcgtttgcaagcttttcaatcagcgccagatctctgccttccaccatgacgcgcagcagcggttctgtgccggacgggcgcacaatgacgcggccttcgccgttcagcgttgcggttgcctgctgaatagccttcttcaccttcgggtcggtgtggaacgccagcttgccctccggcgagaccttgatattcaccatcgtctgcgggtagcgctccatgacggtcttgagggaagaaagctttgcttcgcgctgttttaagatgctcaaaagctgcgctgccgtcagctggccgtcgccggtcgttgcgaaatcgcggaaaatgacgtgaccgctctgctcgccgccaaagctgtagttttcaagcagcatttcttccagcacgtaacgatcgccgaccttcgtcgcttcaaagtggatgccgtttgcttcgcagcactttacaaagccgaggttcgtcatgatggtgccgacgatgcagtccttattcagcttaccgcggctcttcatatcgaggccgcagattgccatgatgaagtcgccgtcgatgacttcgccgttttcgtccacggcaaggcagcggtcggcgtcgccgtcaaacgcgatgcccgcgtcgaccttatgcgtcttcacatattccacgagcgattccatgtgggtggaaccgcagttatcgttgatgttcgtgccgttcggctcatcatgcagcatgtgcaccttggcgccgagctccgtaaacagtgtttccgccgtcatcgcggaggagccgttcgcgcagtcgagcgcgatttcaaggcctgtcagcgagaagtgcaccgtggacttcacgtgatcgatgtaatcgcgcagcgcgttcggcgcatacgacaccgtgccgaggtcgctgtctgcgggcagcggcggcagagccgcttcgccgaggatcagagactcaatgcgctcctcaagatcgtccggcagcttgtagccgtcgccgctgaaaattttaatgccgttatactcgtaagagttgtgtgatgcagagatcatcacaccggcgtctgccttgtatttttccacaaggtacgccacggccggggtaggcacaacgcccagcagaacgaccgatgcgcctacgctgcacaggccggccgccatggcgttttccagcatgtcgctcgaaaggcgggtatccttgccgatgatgacgcgcgggtggcggtttgatttgttgatgagcacggcagcggccgcgcggccaagcttcattgcaagctcgcaggtgaggtcatggttcgcgacaccgcgaacaccgtctgtaccgaataatcttcccataatcgtatgctcctttttatgtcaaaatttttaaggggtgacttttttgattcttttcaacctgttctcccgcatgccgattgtacgcgtttccaaaagagtgtcatacgtcgaatctcgggttatcgtccgcaacggttcccggcggcgtaagtccgaggtgcaagtaagccgcgcgtgtggcacagcggccgcgcggggtacgctgcaaaaagccgatctgcatcagatacggctccacaacgtcttcgatcgtcacggcttcctcgccaatggccgccgccagcgtttccacacccacggggccgccgttataatactggataatcgcgttcagcatgcgtctgtcgccggaatcgagcccaagctcgtcaatctcgaggcggtcaagcgcaatcttcgccgtgctgtatgtgatgacgccgtcgctcatgatctgcgcaaagtcgcgcacgcgctttaacatgcggtttgcgatacgcggcgtaccgcgcgagcgcgaggcaatctccagcgcaccgtccgcttcaatgtcaatacctaaaatgccggcgctgcgggtgacgattttcgcaagctccttcggctcgtagagctccaaacgcagcaccacgccgaaacggtcgcgcagcggcgcagaaagttgaccggctctcgtcgttgcaccgacaagcgtaaaacgcggcagcggcagatgataggacgccgccatttgtcccttgcctgtaataatgtcgagcgcaaagtcctccatggcggggtacaagatctcctccacactgcgcggcagacggtgaatctcatcgatgaacagcacgtcgccgggattcagattcgtcaataatgcggcgaggtcgcccggcttttcgatggccgggccgctcgtgatgcgcagattgacaccgagctcgtttgcaatgatgcccgcaagcgtcgttttgccgagacccggcgggccgtagagcaaaacgtggtcaagcgattcttttctctgctttgccgcctgaatgaacacctctaagttttcttttaccttttcctggcccacatagtccgcaaaggtacgcgggcgcagcgggttttccacctccgcgtcctccggcacatactccggcgcaatgacgcggttttcaaaatccatttcgttgtctctgtcaaacgtcacgcgaaaagcactctcctttcagcgtgtattaaaagcggcttgccatactctttaaagcgccgcgaataagttcttccgtagagagggagccgtccagcttcgccacggcctgcgcggcttcggactgtgtatagccgagcacaataagcgcctgcacggcctgctcggcgttctgagacgcggaaacaatgcccgcgtcgtccgtgccggtcagctccagcgtgccgcccgtaaagcccatcttcttcacgcggtctttcaattccagcacgatgcgctgtgcaagcttcgggcccacgccgctcgcctttgtaaactttttgctgtcgccggaggccgccgccatggcaacgccctccggggtcatttcggataaaatggagagcgccgccttcgggcccacgccgctgatggtcgtcagcatcttgtagcagttcagctcgctttttgtagagaagccgtataaatcaagcgcgtcctcgcgcacgtttaaatgcgtatagaccgtagccgtttcgccgatgcgcggcatgtttttctgcgtgttcatggaagtgaagcacttaaacgccacgccaccgcattcaatagcgacaacgcccggctccatgtgtacaagtttcccggtaagactgtaaaacatcgcttttgtcctttctataccctctgtactctctgtccaaatagacggcgttacctcaaaaactgccgcagcgccgtgccggaggcatggcagtggcaaatggcaatggcgagcgcgtccgccgtgtcgtccggcttcggcacctcgcgcaggcacaaaaggcggcgggtcatttccatcacctgcggctttaaggccttgccatatcccgtaacggccaatttcacctgcacgggggtgtattcaaaaacaggcacgcgggccttctgcgccgcaagcaaaatgacgccacgggcttccgccacaccgatgccggtcgttttattgtttgaaaaatagagcttttccacggagatcgcatccgggtgatactgcgccaaaacctgcgtgatgccgtcgtaaatgatctccaaacggcggttgaaatccgtgcccgctttggttgtcaccgcgccgtgctccaacgtgcggtaacggttgtttttcatttccaccacgccgtagccgacaatggcgtagccggggtcgatgccgagaacgatcatgccgtttttcctttcaaaaccaaagggcagaaaagcccatactgccttatagtatatcatatctcagcccttttgaatagccgaaaatttcgaaaaaattgtgaacggcacgcgggttttccgtataaaaagcggacacaccgccaaaaagccgtgtgcccgcaaaaaacttattattttttactcggcgagcgcctgtgtacgcgctgccatgaccgaaatatgcacgagtccgaagccgtccacgccggaaagcacacggtcgttgagcggcgccgtccagacctccggcaaaagctgtgcacccagtaccataccaagcacagagcccgccgtggcgcagttgcagtccgtgtcaaagcccatcgtcaggcacagctccatcgtgtaggtgaagtccttcttgccccacaataagcccatcgcgacgattgccgcattcgagacggtgtgacaccagtggtgctgattattttcatcgtacttgccgaggatatatgctttcgtctcctcagcggtgtcgccgctttcaaagcggctcaaaatttccgcaagctcttcataaagacgactctttttcgggatctgcttcatgccggagcgaatgatggtcggcatgtcgtcgttaaccgccgctttcgcaagcatcgaggcaatccacatttcgccgtagatgccgtttttcacgtgagagatggacgcatcgcgccatgccatttccgccgccgtttccatatcgccggggcaaatatagccgaacagatcgcccctgatctgtgcgccgatccactccctgtacgggttgcggtacaacgccgattccggcgggaaaacggattgtgcgaggttgatatatgccacgcgctccgccgtgcacaggtgtaaaagcggcaggttcatcagccagttttccgccgcgtcatcgggtgtgaaatcgcgcccgtactgctcgacgagctttaacgcgatgagcgtgtagttcgtgtcatcgtcctccggcatgtaagagacgttgttgatccacccggttttttccgcgccgtaggcgtgtccgtcgtcgcgcacgttgtatttttcgcgcagaacaggcccgatatcggacgaaatgtagttttgcagcggcaggttgccggtctctttcaaaagcccgttgatgcgtgcacgccgccagccctctaccggctgacccaacaggcagcccgcacagcggccgagccacgcgccgtagattttgtcgcaatccgcttcggctttctctttcggttcaccgacagatgccgccttgatgcccggaaggtcggacggctcgtcttcgtcctgcgggttttcaagcgcacaaagctgctctaaaagctctgcgcctgcggcggtacgcgccgcgccgcgcggcatttcctttatctgctcagcacgctctttaaagcgttccgcttccaaaatgccctcgtcaatcctctgctcgatctcaatgggcaaatcgtcacaaaaatcaaaccacaactgttctctgagcataagctgtctcctctccggcgcatttgcgtctgcataaatatacgacacgcaatcgctttgcgcgtaatggctgaaacggttatttcacgcacatatcgtgcgcggtatttctgtttttaattataccgcataatttctcaaaaggcaaatacaaaacgccgtgcgaaaacacagcgttttgtacaatcaacctttcattaacgtgaccataacggccttttgtgcgtgcaaacggttctccgcttcgtcgaagattgggcctgcgttcgcctcgaacacctcttcggtaatctcttcgccgcggtgtgccggcagacagtgctgtacaatggcatcgctctttgcaacgcccatgatcttctcatcgatgcaatagcctgcaaacgccttttcgcgtgctgcgcgctcttcttcctgacccatagatgtccacacgtcggtgataacgacatctgcgtcctttgcggcaaccatcgggtcatcggtcagcgtgaaacagtcatagccggctgcaaaatcgagaatctcctgcggcgggcggtagccctccgggcaagccacagcaacttccatgccaaccttcaggccgccgacgatgagggagttcatcatgttgttgccgtcgccgatgaagcacatcttcaggccgtcgaacgagcccttatattcgcggatcgtcatgaggtcggctaagatctggcacgggtggcagaaatccgtcaaaccgttgatgaccggcacagagccgtactttgcgaggtcttcgacctccttctgctcgaaggtgcggatcatgatgccgtccacatagcgggaaagcacgcgtgcggtatcctgcaccggctcgccgcgaccgatctgcgagccttcgcccgcgagcacaacggcatagccgccgagttgattgatgcccacttcaaacgaaacgcgcgttctggtggaagacttttcaaaaatcatggcaaggcacttgccctttaagtggtggtgctcgatgccgtgctttgtctcatacttgagctggtcggcaaggttcagaatgtcaatgatctcctctttggagagatcgagcagttttaataaatgtttcatgggaatttcctccgtttatttaatctgttccgcaaaaatcgcgagaccggcatcgatctcttcttttgtgatggtgagcggcggcaggaagcgcacaaggtccttcgccgtcaaaatgagcagacccgctttcgcgcaagcattcagcacatcatgagcgtccttgtccttcactttcacgccgatcatcatgccgcggccgcgcacaaactcgacgttcggcattttaagcagtcgctctttgaaatactcacctttttcctgcacttcttttaagaattccggcttggatacgcgggaaacgacctccaccgcaccggcgcacaccacggggtttgcaccgaacgtggagccgttcatgccgggggcaaagctgtcctttactttctcgcccgcgatgcatacgccgatcggcaagccgccgccaagccccttcgccgccgttacaacgtccggcagaatgcccgcgcgctgatagctgaagaagtagcccgtgcggccgatgcccgtctgcacttcgtcaagcatcatcagcacgtcacgctccgtgcacagtgcacgcacggcctttaaatagtcttcctccatcggcaccacgccgccttcgccctgcacgctctcgagcagcacggcgcagacctcggggtcagagagcttcgctttcaggtcttccacgtcgttgcccttggcgtacacaaagccctcggtcagcggggtgaaaagccgatgaaagccgtcctgacccgttgccgccaatgtggtgagcgttctgccgtgaaaagaattttccagcgtgacgatcttatacgcgtgcttcttttcgccgtatttacgggcaattttaatggcgcactcgttcgcttccgcgccgctgttgcagaagaacgaacggcaaaggccgctgttttttgcaagcagttccgcaagctgtgtgtttttatcacagtaataatagttcgacatgtgctgaattttgcccgcctgttcggtgacggccttcacccagccctcgtcgcaatagcccagcgcatttacgccgatgccggaggtgaaatcgtagtaatgcttgccctccacgtcccaagcctcggcgtttttgccgtggctgagcgccacgtccacacggccgtaggaatggaggatatactcctgttcctgctttttaattgcttcaaaactcatattcaaaattccttttgtttccacaatatcgtctgtaccctgttgaaaacatatctgcacttgtcttccacaccgatactatcgccaacgaaccccagtgcttctcccattcgccgttttcgttcacgggtacgggcgcggttttccccttttaatagaacatcgtgccgatgccttcatcggtgaagagctcgaccagaatggagtgcggcgttctgccgtcgatgatatgcgcgcgctctacgccgcggcgcacagcctccacgcagcagtcgatcttcggaatcatgccgccgctgatgatgccgtcgcgcttcagcttcggcacgtcgctgacgtttacgaccgggataagcgtgttttcatcgtccttatcccgcagcagaccgacaatgtcggtcatcaaaatgagcttgcgcgcgccgagttccgccgcaatgcgcgccgccgccacatcggcgttgatgttgtacacctcaccgtggtagcctgccgccaccgtggagataacgggtgtgtagccggaagcaatggcatcttcaacgatcttcgtgttcacttcacggatctcgcccacaaagccgaggtcttcggctgcgggcagcttatccgccttcagcatggaaccgtcaaggccgcacaggccgaccgccttgccgccggtgttttccaaaagctgtacgaggtctttattgactttgcctgccagcacctgctgcacaatgtccatcgtctccgcgtcggtgtagcgcataccgccgacaaagcggctttccttgccgatctttttcagcatgccgctgatctccgggccgccgccgtgcaccagcacgacattcacgccgacgagctgcatcagcacaatatcgttcatcacggcttctttcagctccgggttaatcatagcattgccgccgtatttgacgacgatggtctcgcccgcccactttttgatatacggcatcgcctgcacgagcacatgggcgcggtcgctgttcgagatgccgatcttcttttcttcactcatgttctgtaatctccgttgattttcacatagtcataggtgaggtcgcagccgaaggcttccgcctccgcgtcgccgctgttgagctccaccaaaatggtaatttccttttcatgcagcacctttgcggcttcttcctcgctgaagttgatgcccgcaccgttcacgcagacatctacctgcccgtacgcgctcttaaaggatacgtccaccttgttgatgtcgatatccgcgccggcataaccgatggcgcacagcacgcggccccagttggcgtcttcgccgaacatggcagccttgagcagagaggagcagatgacggactttgcaaccgtcttcgccgtctcccagtccttcgcgccggtcgtcttgcagatgagcagcttcgttgcgccctcgccgtcgcccgccatcatcatggaaagctttctgcaaaccgccgtcagcgcctcaagaaacgtcttgtacgcttcgttttcttcggtgatctcctcgtttcccgcctcgccgttcgccataatggcaagcgtgtcgttcgtggaggtatcgccgtccacgctgatcatgttgaatgtggtgtctgccgccgccttaatggccttttgcagcattggcacggaaacggcgcagtccgtcgtgacaaagcacagcatcgtcgccatgttcgggtggatcatgccggagcccttggagatgccgccgatgcacacctctttgtcgccgagcgtaatctttacggcgcactctttttcgatggtgtcggtcgtcatgatggcctttgccgccatgttggaaccgttttcgttcagcagtgccgccaacgccggggctgcattctcaatcggcgcgatcggcaaaatctgcccgataacgcccgtagacgcgacgatgacatcgtgcgggtcaatgccgagcgcttcgcccgcgatttcgcacatgcgccacgctttcttttcgccgtctgcgttgcaggtgttggcgttgccgctgttgcagatgaccgcctgtgcgcggccatccgcgatatttttgcgtgtgacaagaatcggcgcaccctttacaaggttctgcgtgtaaacgcctgccgccgcacacggtgttttgctgaaaatcatagccagatcggctttggacttatttttgcggatgccgcagtggatgccgccggctaaaaagcccttggccgcggtgacgccgccttcgataaactgcatactgaatttctccctatataaaatcgctttcccttaatttcgtactcttttagaatgccggcggaacgagctttaagccgcaggtttcgtccagaccgaacagaatgttcatgttctgaatggcctgccctgccgcgcccttcaccatgttatcgatagcgctgatggcgatgaacgtgccggtgcgcgggtccgtaaagatggacacgtcgcagaaattcgtgtacttgatgttgtgaatatcggcgctcttgccctttggcagcaaacgcacaaacggctctttgccgtatctttcctcatacgccgcgcgaagcatttcctccgtaacgcccggcttgagttttgcatagcatgtcgctaaaatgccgcggttcaccggcagcagatgcggcacgaacgtgatgtgcattttctcacccgaaattttggaaagcgtctgctcgatttccggcgtatggcggtggcacgcgactttatacgcggacataccctcattcagctccgggtagtggctgttctgcgccggctttctgcccgcgccggtcacgccggacgcgcagtttgcgatgatgccggtcgtctcgatatagcccttttccagcgccggcacgagtgcaagcggcaccgccgtggtgtagcagcccgggtttgcaacgagctttgtcttcttaatttcctcgcggaacagctccggcagaccgtacacggctttttcgtgcagcgccttatccgtaaatgtgccgccgtaccactcggtgtattcttcctcgctctttaagcggaagtccgcgccgaggtcgatgaacgccttgccttttttgtcacactccgcagcaagctcctgtgaaaggccgtgcggcaaagcggcaaagatgacatcgcttttttccacaaccgcttcctgcgtggtgcagatgaggtcgcacatttcgcggtatgccgggtaaacgtccgacaaagcctgtccctcaaagcttacagagctgatggccgcaagctccgctgcgggatgccccgcaatcaggcggcagatctccgcgcccgcataaccggtggcgcccacgacgccgaccttaatcttttccattttgagacccccaacaaaggtaaaattgaatttatagcccgtttacgatcgtgcgcacttcttttgccgccgcgtggacgttctccgggcacggcgcacccttgaccttgcggtcgcgcacgcatttttcaaggttgatggcctcgtacacgccctcgtcgaacgcattacagacctttttgtattcgtcgatcggcagcgtctccagcgtcaggccgcgctcgatgcacaaggcgacaagctcgcccgtaatcttatacgcatcgcggaacggcaggccctttgaagccaccagataatccgcgcaatccgttgcattgatgaaaccctttgccgctgcggcgcgcatgttctcttttaaaacgcgcattgttttcagcatcgggataaacggcgtcaggcacaggcgcagggtatccaccgcgtcaaacacggcttccttgtcctcctgcatgtccttgttgtacgcgagcggcagacccttcatcatggtcaaaagcgccatcaggtcgccgaacacgcggccgctcttgccgcggataagctccgtaatatccgggttcttcttctgcggcatgatgctggagccggtggaaaacgcgtcgtccagctcgatgaatttaaactcccacgagcaccaaagaatgatctcctcggaaaatctcgaaagatgcaccatcgcaagcgaaatcgccgcggcgatttccgcgcagaaatcgcggtcggcaacgccgtcgaggctgttgcggctcacgccggagaagccgagcagcttcgccgtcaaatcacggtcgagcgggtacgtcgttccggccaaagcgccggagccgagcgggcaaacgtccatacgctttaacgcgtcctgcatacggccgatgtcgcgcaggaacatttcggcatacgccattaaatgatgcccgaacgtgatgggctgtgcgcgctgcaaatgcgtatagcccggcataacggtgtcggcatattcctccgcctggtcgcacaggacgttgatgagctcttttaactgttccatgagccccgcgcactccttgcgcagcgtcagacgaacatccagcgcaacctgatcgttgcggctgcgggcggtatgtaatctcttgcctgcgtcgccgatgcgcgccgtcagctcgccctcgataaacgtgtgaatatcttcggcatcggggtcaatgtgcagagcgcccgtctcgatgtccttttcgattttctcaagctccgcgcagattttttcgctttcgcctttatcgatgattcccgccgcgccgagcattgtggcatgcgcaatgctgccctcaatatcctctttgtacatacggctgtcaatagaaatagacgagttaaagtcgttcgtcttcgggtctgcctccttctggaagcggcctttccataatttcatggctgaatctttccttcccgtttatggcagaaaagggcaggcagatgaatgcctaccctaaatctacttttgaattatttattttcggtctttgccttcatgtgtgcataaaccttgatcggcaggccgaacaggttgatgaagccgtctgcatccgcctgattgtagacctcatcctcatcgaacgttgcaatctccgggtcatacaggctgtacggagaagtgacacctgcatcaatgatgttgcccttataaagcttcagcttgacatcgccggtgacggtctgctgggtggaatctacgaatgcggaaagcgcctcgcgcagcggggtgaaccactggccgtagtaaacaagttccgcaaacttcaaaccgacctgctgcttgtagtggaacgtgtctctgtccaggcacagctcttcaagcttattgtgtgcgtggtaaaggattgcaccgcccggagtctcataaacgccgcggctcttcatgccgacaagtctgttctctacgatatccgcaaggcctacgccgttcttgccgccgagctcgttgagcgtcgttacaacttccacaccgttcatttccttgccgttgatggcggtcggcttgcccttttcaaaatgaatcgtcacataagtgggcttgtccggggcctgctccggggaaacgccgagctcaagaaagcccgggtggttgtactgcggctcgtttgccgggtcttcaaggtcaagaccctcatgggacagatgccaaatgttcttatccttggagtagtttgtttcacggttgatcttcagcggaatgttgtgtgcttccgcatactcgatttcttcttctctcgatttgatgctccactctctccacggagcgatgatggtcatttcgggagcaaacgccttaatggtcagctcgaaacgaacctgatcgttgcccttgccggtgcagccgtggcagatggcgtctgcgccctcggccttggcaatttcaacgatgcgctttgcgatgatcgggcgggcaaaggacgtgccaagcaggtacttgttctcgtagaccgcacctgcctgtacggtgggataaacatattcctgaatgaattcttccttgaggtcttcaatgtagagcttcgatgcaccggtcttcagtgctttttcttccagaccgtcaagctccgtgccctgacccacgtcggcggaaaccgcgatgacctcgcagttgttgtagttttccttcagccacgggatgatgatggaggtatccagaccaccggagtacgccagaacgacctttttaatatccttctttgcctttgccatgatgtaacccttccttttttcataaaccgccgtcatcgtgcggcggagaatgatttgtttcaacggtcattattatacaccgtttttcggaaaaatcaacccttttcttgaatatttattcatcttttttgaaagttgtcgaaatccccagatttcatgcgggtttttcggctttatatttgtgtattcttcaaaatttgatcttcaaaagtatgcatttttgaatgaataaagcgcatattatacatctctatacaccgttttatacattttcgctttcggaattgttttctacgatatagggctttatcagcgccatttcgcgcggctccacacgggcatgaataaggagcccttccggcacgtattcttcggagacgagcgcgcccgcttttctcagctgtgccgcaatgcccgtctttgcaaacggcagcagcgccgtcacatccaccggcttcaccggcaggttatcttcaatcgcctgcaaaagcgccgggatgccttcgtttttcagcgcactgatgcgcaccgcgcccgtcaaatgcaaagcgctgtccgcatcgcccacaagatcccatttattcagcaccgggataaccgggcggtcaccgcagccgaggctctgcaaaatttcatttgtcacatccaagtgcgtgcgtgcttcggggctggaagcatcgcacacgttcaaaatgatgtccgccgttgcagcctgctccaacgtggagcggaacgcctccaccaaatggtgcggcaagcggcgcacaaggccgaccgtatcgatgagcataacggtcttgccgccgggcagcttcaacgcgcgcgccgtggggtccagcgtcgcgaaaagcttatcctccgccaaaacgcccgcttgcgtcaagagattcatcaaggtcgatttgcctgcattcgtgtaaccgacgagcgccaccgtcaccgtgccgtccttttcgcggcggcgctgcgtctcgtggcggccgacttctattttcttcaactgctcgcgcagcgcttcaattctgcggcgaatgtgtcggcggtcggtctccagcttcgtttcgcccgggccgcgcgtgccgatgccgccgccgagacgcgaaagcgccgtgcccttaccggtcaaacgtggcagaagatactttaactgcgccgcttccacctgcaccttgcctgcgcggctctgcgcacgctgcgcaaaaatatcgaggatcagcatcgtgcggtccacaacgcgcacgtccgtcgcattttcaaggttgcggatctgcgtcggcgtcagctcgcggtcaaaaataatcagctcaatctcgttgttctcgcagaaattccgaatttcctccaccatgccgctgcctacgcacgtcgcggtctccggggaggggcgtttctgcatcatcgtcgcaataggctcggcgccgccgctttttgcaagttcccacagctcgcgcagcgattcctccgcgtcatactcgcccgtgtccagcgagaccaaaagcgtgcgctccggcacgattacgttttccgtataattcataaggttctcctttttcgtgtctgatttatcgtttcaaagccgcagcgttttccgccgcacagcttgtgttttcatttcttattatacagaaaatgaagaagaaaacaatcaatatttatcaatcaatggtgaattccttgcatttctgaactcgaaaatttctaatacttattttaaatagtattgacttttagctgtatatatgttagtgttgacttgtacaaataacttattttgaattgaggtgcttccaatgtacatttaaagtcttctttaaatttcgccttacaaactctaatgcgtatttgtacatttgagtattaaaaatgctgtgtaattatttgcaatttattctaaagtttatttagatgaaaggagtttctcatgaagaaattggtctcaacagtcatttctatgcttttgtttttatctagcgtattcgtatatgcaagcgaacccactttctccacttcggcgtctctagaaaaagttcaaacattttccgctcaaaccttacctgaatctatttacaaattcattgaagattgtgatgtcgaaatcaaagatgactctgtcatctggattgaacaagatagcaattcatccgctctccgtattcaaaacacagaaggcaccaaaaaaacattaaccagcgtcttcgaaatttcaactgacgaagatggtaattctttcaaaaacaattccgtcgccgaacttttaaatcctcctattcaacccctggacggatacacacagccgttcaatcaagagggaattaaagttagttatacatgcgtgtataaccttgaaatttcggatcgttggtattaccacatgattggctcatatttcacatacaaagctgatgctggaacggcacccagttctattcgcctctggtttagcggatatggtgatttatatcaaaaaagctcatcttcctataaacttctaaaagaagatcagcacaaagtaattgattttactcgatatgctccttcaaaaaatacaatgtattcgaaaaccgacgaaatgcccacaaatcaatatattgttcccatcaatgcaaatggtggtatggaagtaatcctctatgtaaatgttggtggccggcaattatatgaccactatatattttcataatctcaataatatttaatcataacaagtgagtggttaagacaatgaaaaagcaatttgcggtcatgttctgccttttggcgatatttacatgccttgtcgggtgctcaaccggctcaaaagcctcattccccgaaacgtttatcggctctgtgggacaggaggaaaccgatgcgctgaaaacgctcggtactaccgaacaggcgctctccgattataccgttgacgtttacggcaaaaccgccgatgtgcagctctcgtttgatgcataccgcggcgatgaaacctccgccggcaagctcaactacgcagagctcaccgtaccgtgcacgccgaatgatgacggcttttcatacatgcgcacctgctacgacaagcttgaaaaagcgctcggcgaaccgttcacgaccgacgtgaacatggacggcgtttccgccgaagacgataccgatacgctttttgcggcgctgcaaaaagatgcaggcggcgaaaacatctgcgccttacaataccagtggcgcggcctcggtgaaaacgaatcgctgctttacctttattactatccgaacgaaaacggctcggcgcgcgtaaagctcacgtttttgccgaaagagcgtgcacaaattccataaagctctgtaaaaagacgcggaagttttgaaaagctcctgcgctttttgcgttttcaaaaaatttacaggttttcgatttgctttttttcgcgtattgtggtaatatacgatattattatacatgccaagcggcatatggctgcggcaaattttttgtaggaaagacaggttattttttctcagatggacagtcacagtacagggttgatcatagcgttgatcgttctgatcgttttgtccgcctatttctccgccacggaaacggcgttttcgtcgctcaaccgtatccggctcaaaaacttggccgataacggcaacaagcgcgcaaagctcgcctataagctcgtggataattacgacgagctcatctcctccgttctggtgggaaacaacatcgtcaacatcagtgcgtcttctctcgccaccgttttgtttatcaaagcattcggcgacaacggtcccaccgtttccaccatcgccatgacgattatcgtgctcattttcggcgaggtcacgccgaaaagcatcgcaaaagagtccccggaagcgttcgctatgttttccgcgcccatcatcaacgtgctcatttacgtcttcaagcccattaacgtatgtcttgtgggcatcaaaaagctggtgaaaaaattcgtaaaggtctctaacgaccgtaccatttcggaaagcgaactgctcaccatcgtggaggaagccgagcacgacggcggtatcaacgaaaacgaaagcgagcttatccacaacgtcatcgagttcgacgaccttgaagccatcgatatcatgacgccgcgcgtagacgtggaagccgtggataagacgagcaccgtgcaggaaatcgccgacctctttacggaaacaggcttttcgcgcctgccggtgtatgaggagacgattgacagcatcgtcggcattatcaatgagaaagatttccataacctcgtgctgcgcgacggcaacgcggtgaagcagatcatcaagcccgtggagttcatcccgccttcgatgaaaatttccgcgctcttaaagcttttgcagcaaaacaaatcgcaccttgccgtcatcgtggatgagttcggcggcaccgagggcatcgtcacgctggaagacatcatcgaagagcttgtcggcgagatctgggacgaacacgacgaagtggtggaagcgtttcaaaaggtcagcgacaacgaataccttgtcgattgctccaccaaccttgacgagcttcttgaatacttccgtttgaagtccgattccgaagcctccaccatcaacggttgggtcattgagcagctcgatcgcatccccgaaaagggcgactgcttcgattttgaaaacctgcatgtcgttgtagaagaaacagagtaccagcgtgccacccgcgtgcgcatcactgtgtctccgaaaaaggaagagcccgaagaagcataaaactccataatccataaatcattcctaattgcgccccgctgtttaacgcagcggggtttcgctttgcaaaagcatccgccaaaataatttgcaaatctttttctttccttttaaacaggtttatgctataataaaatcgacaaaaatctttctcgtattttattgaaaattgtaagaatttcgtaaggagattttaagaaatgctgaagctggagcttttactgcgccgcattcgcggttttgacgcaaagcgcatgatggtgtatgttcgcgacgtcaaaaaggagaccaaaacgcccacacccgtcatcatggcggatatgctgtactgcattttgcggtataacgtaggattttacgattaccacattttcggttttgcgcacatccacggcgcaaaggcaagaagcacattcttcaccatgcaggataactggcgcttgacccgcatggtaaacagccctgaagaccgcccctattttgaaaacaagctgctgttctgccgcacgtttgcgccgtacctcggacggtcatttttagacctcaatgaagccggtgaggacgcgcttaccgattttctgcgccaccaccccgtggtgtttttaaaagagccggaaagcttcggtggtctgggggtcaaacgttttgacagcgccgggaccgatttaaacgaccgagaggccgtgaaaaggctgcgcgaaaactgggtgcaaaacggcttactgctcgtggaggaagccttacagcagcacccggaaatgagcgcgctgtatccgtattcgctcaacaccctgcgcgtctgcaccttaacagatgacaaaggcgacgtgcatgtgctgtacagctttgtgcgcacgggccgccacggctcatttgtggataacaccacaagcggcgggctcaacgcgctcatctgcgacgacggtgtcatccgccgccccgctatgtccgataaaaccggcatgtatttcgacatgcaccccgatacctgcacgccattcataaacttccgcgtgccatattttgatgaagcgattgcgctgtgcaaaaaagccgcgaaggtccgccccgacatgcggtacgtcggctgggacgtgggcatcacccccaccggtcccgttttggtggagggcaacaacctccccgcctacgacgggcagatctaccaccagcaggagaaccccggcaccggcctccgtccccttgtccgctccatcatcccggagttttagtttacataattttaaaatcatacgcagaaacccgcattgcagccggaaattccgtttgcaatgcgggtcttttatttttcggttcgttccgcgcgtctggctttgaagaaccggcgcaggattgccgtgcattcttcacacagcaatccgcggtataattcgggtttaaaggcatttttgagcgacgtcaccgacacagccgtgccgcacgcacccatagcttcgtcttccgtgccgaacacgatgcggtccacgcgggcgtttaccgtcgcgcccgcacacatgggacacggctccagcgtcacatacagcgtacagccggtcaaccgccaggagccgagcacttttgccgcctgttccatcgcttccagctccgcatggccaagcacactctgatgctcttctcgccgattccgcccacgcccgatgactttgccgtccttcacaacaacggcgcccaccggcacttcacctgccgaaaaggcttcttccgcaagcgaaagcgcctcgcgcatgaacttttcctccggcacaaacgcgcggtttttcatggcattatacggcatatgtccccttacgaatacagcgtcacgatacacatgacgacaaacagcacatagtagcagatgaaaccgggattcacgaacatccacaacgccttcccgcgtaccggtacgccgcgctgcatgggcgtgcggaacaccttatgaccggtgaaattgcggataagcagcaccacaagcgcaatcagtcccaagccgtacacgatatacgtcagcaaattgctcgcgatattggccgcatccgcgcccacaagcccctcaagggcgataggcagcgtcgcaagcaggttattgagcatgtgcacgaaaatgttcacccaaatgttgcgggtacgcacatacaaaagcgccattacaaagcccgccgtaagcaccacgggcaaggactgaatgctgtaatgtgccatgccgaaaatcagtgcggagaagatcaccgcaggccagtcaccccagcggcgcatgacggccgtcgtcacgctgcgaaacgcaaattcctccgtcaccggcgcgacgagcacgaccgaaacgaacatcgtcaacgcctgcacaggcgtcagcgccaaaaggtctgccgtgtttgcgtcgccgttcagccccgcgccctccaaaagctgcgagatgaggtttgcgggaatgttcatcaaaacactgacggcaaggcccgcaaagacgagcaaaacactgttcagcacaccgtttttctccacaagcaccgtgtccgagagctttcttttcccaaagaacagaaaaaacgagaacggcagcacaatggataagaacgatgcaatggacgaaataaggtaatacgccgtcggcggaaagtcgccaatggtgttcggccccataaaattcacgccgcacaccgttaaaatcagcgttgcaagcgtcgtccacaaaacctgtatcggcaaagaggtcatggtcgcaaacgaaaggcgggaggccgcgcggcgcagctccttttgctccaaacgcgcggggtccgcccacttcggcggctgtacgggtgcgtaatatacaggctgctgcaccggctgtgcataaacgggcgcgccgttcccgccctgcggcggatatgtatacgccggcgtcgggttctgcaccggcgcgggattctgcggcgcggtatacaccggctgcccgttataaagcggctgcgtcaccggctgcccagcgggcgtgtagttccggttatcgttcatgctcattcatcctttccctttttggttttcccgtttttttcgggctttttcacgtgaaaacggatcatcagcttttccacccagccctttttgtacttgagggaaatgtagccgatggtgctcatcaccagtgcgccgatggcgtccacgatgatgtccttcatcgtgtcctgcaaggctgcctgcccaataagcgccgtgccgttatccagcatatatttctgcatgttagtgccgaaaacggaatccatcgtgaattcataaatttcccacaccgcgcccatcgcaagcgcaaagcaaaacgcaaatacggcgatgaacaccggtgaaagattcaacggtatgcgctccgcattgttgaaaatcgcaatcatggaaaagccaagcgcgcccagcattgcgccgctcatcgtgtgcagaatcgtgtcccactgcggtacggcgtagtaaaagcttcgcacctcgccgaggaagatcgcgcagtacaaaaacgcaatgtacaaaaccagcatcacgcgcggaatctgcagcgttttctgccggatgagccgcagcggcagcacaatggcgacaatgcccaaaaggcactgcaaaagcatcagcacatagtcttcgcggctgcgcacttcctccgtcccgccgccgtgcgacacaatacgtactacaaggtagccaagcggcagaataaagctcagcaacaccgccatgatgaacatgccggtaaagtcccgttttcttttcggcttcatagcccgtcctcctaatgggggtattttttactgtgcaagcagctccgcgacgttgtttgcgtaagcgaccgggtcttcaatggagcggccctcaataagcagcgcctgatcgtacagcacttcagtgtactttttcagcttgtcttcgtcgttttcaaagcggcgcagcacctcaaacaccgggtgttcggtgttgagctcaaatatctgctcggctttcaccttctgctccgcgcccggcatggagtttagcaccttctccatctccatggagatcgcgccgtccgtcgtgatgcacacggggtgatttttaagtgtcgtcgaaacacgcacgtcctttacacgctcgccgagaatcgtcttcatcttctcaagcagagccttgttttcctccgcctgcttttcggcagcctgcttttcttcttcggtctgcacgcgtgcgtcttccgccgcaacgttcttgaagctcttgccttcgtactcctgcaacaccatcagcgcgaactcgtccacatcgtccgtaaggtacagcacctcgtagccgcggtcaagcacggcttcggtctgcggcagatgcgcaatgcgctccggggtctcgcccgccgcgtagtaaatgcaggtctggtcttccttcatgtcctgaacgtactctttcagcgtgcgcatcttgcctgtggaggagcggaacagcacaagatccttgagcttatccttattgatgccgtagttctcgtacatgccgaatttgagtctcaaaccgaaactttcaaagaacttctcgtagttctctctgtcgtgctccagcatggatttaagctccgacgcaatcttcttctcaatgcgcgtcgcgataagttttaactgacggtcgtgctgcagcatttcacgggagatattcagcgacagatcctgcgaatcgacaaggcccttcacaaagccgaagtaatccggcagcaggtctgcgcacttttccataatgagcacgccggaagcatacagctgcaaacccttttcgtagtctctcgaataataatccatcggcgcttttgcagggataaacagcagtgcgttatacgtcgctgtaccctctgcggaggtatggataaccttcagcgggtcctgccaatcgtagaacttctccttatagaagctgttgtattcttctgcagtgatctcgtttttattcttcttccacagcggcaccatactgttgagggtctccacctcaaaatagtgctcatattcgttctccgtaccctccttcgcacgggtcttttcgacctccatacggatggggtagcggatataatcggaatacttcttcacgagcgaacgaatgcggtatgtatcgaggaactcgctgtacttttcttcctcggtgtcctctttgatatgcaaaataatctcggtgccgtgatcggccttttcgcactcgcggatggtatagccgtccgcgccgtcggactcccagcaatacgcctgctctgcgccgtacgccttggattccacgcgcacgtggtcgctgaccataaacgcggaatagaagcccacgccgaactgaccgatgatgtcgatatcctcgttcttttcgttttcagacttgaatttcagcgagccgctctttgcgatgacgccgaggttctggtcaagctcctcctgcgtcatgccgatgccgttatcgcggatacgcagcgtgcggctgtccttatccgccgcaaggaagatctggaagtcgtcacgattgagtcccgtagcgccgtccgccagggatttatagtaaagcttatcgatcgcgtcgctcgcgttggagatcagctcgcgcagaaaaatctccttatgggtataaatagagttgatcatgagatcaagaagtcttttagactccgctttaaactgtttttttgccatgcaaattctacctctttttcattttgggcatcaaaatcgcgcattcatccgcccgcgttctctttctaacaactatactatacatttgttaaaaaatcacgaacaattttaatttggttaaaaaaagaacggtttaaatttaaatttcgcatggattattttttctaaaggcggcaatgccgccttttaagaaaccccttgatagggtttcttacgaaaaatcgtccaccggacgatttttctattttcctgatctttgggtaggcaaaaggatttcgccatttgcgaatggcgactcaaggctctgccttgatgaatccaagcgaacgcttatgttcgctttcaagttttctcgaagaaaacttgactaaagacttttaaccatgctcgccgttagaactctgcggcaaacaaaagaacttttcaaagaaccgccacaccttcactgccccggtcacggggattctcgcgtccagctcaaacgcgttgattttcaaaaatgccttaccgtccgcctgatacagcatttccgccggcggggcgttgtcattaaagctcagccgtcttccctcggcgtccaccatcagcataccgaacacaaacagcagcaccagcacggtgcaaaaaaacgacatcaaaaacgcgcgggaacacacacatttgcgcatgcaaaacacctccgcatgcagtatgccccgtccgttttccgctattcctccgctatgtcgtttaaaaccgccagaatcgtctcgcccagcagctccccggcgtagtccgcctccctttgcgtattcacctctgtaccgacctccaccaaaagcgagccgtgcgtggcgtgcatattgtagtttctctgcgcgaaaaacagcggtcgaaacagccccggatataataaatcgcctttttgctgcaagcgcaaggccaaatgcaaattttcccgccaatccgggaacagcgggtcttccgaaaggtcacaccccgccataatcatgatctgcgcggcattctccccgtttacctccgccacgggcttataccgtgtgccgtcgtcctcctcaccgaacgcgtctctgtgcacatccacggtgatctgtatcgtggggtatttcagtaaattttcctgcatcgcatccattgagcgctggtagctgccggaatacgtctcgtcaaaccttgtcgtgtcgtggatcacgccgaacccgcccgcttctatcacgtctttcgccctttttgccaccgccacaacgcttttttcttcttcctccgtgcgaaagctctcatcgcggtaataccagtccgattcatactgcaagtacgcttctgacgtatgcgtggagtaaagcagcaccaccggcgagccgtcgcgcttcacgtgcacatcggggtcaattagaatttcttccgataaatcaagccccgagtccgaagtatccttcacaaaaaagccgtttatctcttctcctccgcccataaaggtcgcggcgaccgctgccgtttcacgctccgggtcaggtgtcggcgccggcagcacgggcagctccgtgtctgttttctcctgtacgggcacaggtgtcgccgtggggagcaatgttgcttccggctccgtttcttttacggcctccttttggggcgcaggcgatgcttccgcttgcggcgcttcttggcttgttgccgcctgtaagcccgccgccctaagcgcccacgccgcgccgttttcctttacaaccggccacaaattatcccccatgcaccaaagtgacacggccgccgccagcaccgcgcaaattctgtatccgatttttccgatccgttcctttcgcatcgcactgcctccatttgtgtggcatatccgtcttatcatgcttatgatacggcatacaaaattatgcacatgtacacggttcggacgcggaaaattcacaaattcgacattttcacacagcaccaatatgctataataaaatatatcattcctaagttttgaacgattttaaaaaactcgcagaaccccaaacgggaaacgaagaaaggatggactgcatggcaagatccgtatactcagaaatcacccccgaaatggaagccctcgccgatctttgcgtgaaaaacggtaagattgacccggagctctatgcaaaatacgacgtaaagtgcggcctgcgcgacattaacggcaacggcgttctgaccggccttaccgatatttcggagatccgctccagccgcatggaaaacggcgtgaaaatcccctgcgaagggcagcttttctaccgcggttacagcattgaagatcttgtccgcagcatgccgagcgaccacagcttcggctttgaagtgaccgcctacctgctccttttcggtgaactgccgagtaaagaacagcttgacggattcatcaaacagctttcgttctaccgcacattacccacaaatttcgtgcgcgacatcatcatgaaagcgccgagcggcgacatgatgaacaccctcgcccgcagcgtgctgacgatgtattcctatgacgacgccccggacgacatctccatcccgaacgtgctgcgccagtgcattcagctcatcgccatttttccgcttctttccgtctacggctatcaggcgtatcgccactatcacgacggaaaaagtctttacattcaccagccgaagccggagcttaccaccgccgaaaatattctgcgtattctgcgttccgataaacagttcaccccgctggaagccaaggtgctcgacatcgcgcttatgctgcacgcagagcacggcggcggcaacaactccacgttcacaacacatgtcgtgtcgtcctccggcacggatacgtattccgccattgccgcggcactcggctctttaaaaggcccaaagcacggcggcgcgaacatcaaggttgtacgcatgtttcgtgacatgaaggagcaggtcaaggactggacgaacgagaatgaaatctgcgattacctcacccgcctgcttgataaaaaagcgttcgataacgccgggctcatctacggcatgggccacgccgtgtattccgtctccgaccccagagcacgcatcatggagcgctttgcagagggcctttccaaagaaaaaggccgtgaggacgagtacggactatacatgcgcgtcgcacggctcgcgccgcaggtcatcgccgaaaagcgccgcatctataaaggcgtctccgcaaacgtagacttttacagcggcttcatttacagcatgctcgatttgccgatggagctgtatacacccattttcgcctgcgcaagaatcgccggctggagcgcccaccgcatcgaagagctcatcaatgccggtaaaatcatccgcccggcgtataaagccatccaccccgagcgcgcgtttccgggtatggaaagcgaaacctaaagcttccggcaaccttagcgaagcgacgaataaaatttcgtccaccttttcaaaggtggtggtttccaaaggcaaagcctttggtcgctttccgcagaaagcgaaactcttttgcctaccatagatcaggaagataggcggaaacttccagtggacgtttccaccgtaagaaaccctatcaaggggtttcttgaagaactcgccacgcgagttcttcaaaatggaacatagtattaaagcgcacagccctcaagctgcgcgcttttttcttacaaaaactacgattaaagcaatcaccagacccgccggtataaccacccaaacgggaaccgtcaccgtccgcggcgagctcatcaccgtgatgacatattccggcatctcactttctctttccgcgttgccggaggacggaaagctcatgcagatcaagcggcttttcgcgccgtttttcagctcactgccaagcagcacctccgtttgcaggtctttcggcatgaccgtcaccgcatgttcaccgctccacaaatcatcggacgttttccgcgtgtactccacgccatcctgcgggctgaaagggttgagatagtcgttcacggccacggtgatctcatcgtcttccgtaacggacacgttattcagctgcaaaacgagcaccgtgcggtaattttcttccccgttttccgcatagcggtacgtatatgcttccgccgtcgcttttgccgcatcaacggtttcttttcccgcttctttcaccgtcacctgcacggcagaggatacttcctccgcattttcgggaacaacctgctccatatacgcccgcacgacctcctcttttgtgtgcgcactttctgctgcaaacacagagcccgtcgtaagggtcaaaataagcagcataaccccggtcatccaaattcgcttttgcacggctttccctccccgcaaagtcattttattcttcttaactacactctatcaaaaagcgaacggagcgtcaacagatttcaattctcagcttccgtcacaagcttcatcagcaatgttttcagttcttccgtggtctccacggtgtaatccgcgcccgcttcttccagctcgccgggttccgcaaagccgaagtacacgccaatgcccggcacgccgcaatttttcgcgccgatcatatcaaagcttcggtcgccgaccatgaaaaacgtattgttttcctttccgcccgcgcggcgcatggcctcctgcatcacttcggtcttatccgtcatggagccatcgagattcgcgccgacaatctggtcgaacagctcaaagatcccgttttgcttcaagatcttctccgtgaacaccgtcggctttgaggtggaaacactcaatttcacacctgcgcttttcagcgcctccaacagttctttcatgccggggtacaagcgattttcgtacacgcctttttctttgtagcgcacgcggtagcggtctaccgcctcaaacgcctgctctttggaaaagccgtagaattccataaaggattcatgcagcggcggaccgatgaactttttcagcgtctccatcggctggttcggatagccgtagctgtcgagcgcaaactgcgtgcttttcgtgatgccctcgctgttatcgacaagggtgccgtctaaatcaaacaaaacccaaatactcatcttcttctgcctgcacctccgccatgcgtggagcctccgcctgcgcgcggcgcaccgccgcccgaacggccgctgccaaagccgccggagcgtccgccaccgggacggggaccgcccgagggacgcgagccgctaaatccacccggtctcgggccgccgaatccgggaccgcccgggccgcgcggcggacggggtccgcgccagaagccgcccatcggaggcggcgggggcggcgcgccccaacctctgcggtaataccgtctgcgcggacgcagcacgctcagcgcaataatcaaaatgacgaacaaaaccacaaagaagaaccgccagacccgcgagaagaagcgctggaatccggataaaaatccgccggatgtattattattcgcataattataattggtgttcgcattcgcgttgtttgtcgtacccgtggaatacgagacattgtagtggtcttccaaaatctccaccgcgcgggcgtagacctttttcacgccgctgtcgtactctttcgcggcaaaatcgtcctcaaggtagtcatacagcatcgcgtccagcacgccgccggtaaaaacatcggtcagccccacgcccggctcggcgtagtaatcctccgcaccgatggaaagcagaatcaagagaccgttattcgctttcttgtcaccgataccccacttgttaaagaggtcatacgcataatcggcaatatcctcgccgtcggtgaaatccacggtcgccaccacgacctccgcgccgcaggcttcggcaagtgcgctgcccgtgcgctcaatatagctttccgtcgaggacgaaagcacattcgcgccgtcatacacatagcccgtcggggcatccggcaatgccacggcaaacgccggcaccgccataagtacgagcaccagcaccgtaagcagcacagcgcccgtctttttcaaaacaggatatacggtctttgtcataagcatttcctttccctgtccgtttcaaacttttacgcgaacagctccacatcgccgatgcccaccagcttcgccagtgcatacgcaggcgaattgtgcagcgcatcgttgaatgcggcggctttatcgttgtaatcgtcgcgcatcagataatccaagtcggaattgtagttcgacatcagcgattcgcggtacgttgcgtcctcctcattcatgtcgatattcttgatctggcgatacatcgccttcaccgccgtcgtcaggtcgtttaaagccgcgtacttgtccgccgggcgctcggcctttttcaccgcgttctgcgccgtgcgcacggcatctacaagcgtcaagtccgtctcgctgtatttttccgcgatcgtcaccagattcgatgcttcggaaaccatcatcgagacctggtccaaaacgccgtacacgtcgtcggagccgtagtattccgctgtcacattgttgcgctcgcgcgacaaagatatacacgcgccgactgggatcgccgccaaaattaacaccaccatcgcaatgaccgccgaaacacggcccacggcttttacgccatcgtttttctttttcataaaaaattcctttctgctttttctgtctatatgcaaatccatgacacgcaaatctaaagtctataaacgcacagccgggcagcactgcaagcacaacccggccggtgttctctttatttacgcgcgaatgtctaaaagcttctgcttcagctcgttttccaaacggccgagctcctgctccgcttcgcggcggcgggtcttgccctcttcctgaattttcacaacttcatcgagtgtcgagatgagcgactggtttgtctggcgcagcgtctccatgtcaacaatgccgcgctcggattcgcgcgccgtctcaatggtactcatcttcagcttctctgcgttcttgcgcagcagctcgttcgtcatatcggtcacttcacgctgtgcgcgcaccgcatctgcagagtgcgccacaccaagcgccaataccatctggctcttccaaagcggaatggtgttcacaatggtggactgaattttctccgccatcaaacggtcgttgttctgcacaagacgaatttgcggcgacatctgcacggaaaccatgcgggtcagctcgaggtcatgcagcttcttttcaaagctgtcgcactgctgtgcaaagtcgtttgccgcctgcgcgtcctccggcaggccggagcgctgtgcctttgctttcagctcttccagcgtcgtttcgcgctctcttttcaggcgctttttgcccgccagaatgtacatggaaagctctttgtggtacgcaaggttcgtttcgtacagcttatcgagcatcacgatgtccttcatcagctgcacctggtggccctcaagggaagacgcgatcttattcacgttcacttcggccttgtcgtaacgtgccttcatgccatcgaggcggtttgcctgctttttaaagaagccgaggaagcccttttcctcttcgcccgcatcaaagcttttcagctctacaacaaggttcgcaatctcatcgcctacttcaccgaggtccttcgtacgcacatttgcaagcgccgtgtcggagaagtttgcaattttcttctgtgcgccggagccatactgcatcacgagcgcagagcttgtaatgtcaattttttccgcaaagtcgtctacgaccttctgttcttcgggcgtaagctgtacttcgggctgttcctcttcttttttctcaggggctacaggcttttcttcctccacgccgtccagcgtcagggtgggaatgccgggtgcgggggtctccagctcgggctctaaggtcaatttcacgtcgctcatgttgttcgtcctccttatattcaccgtgtgcgtcacacggtcaaaaatcactttgtctgtgttttgcttgtgtcgttcgggtcaaggcccggcattttcatgtcttcgccggaaaggccctcctgcttcaaaatggattccatcacgctgatgtccgccgcaatgtccagcgcatcgtcatcaaacaggctgtccagctgcttttcaaacgcgcccgcgatcgtctccatcatgccttcaatctcaaacatcgtcttttgaatgttctcgcccttcactctctggcggctcagcttatcatagctgttcagaagcttcagcgttgtcggcagatagtagttcataaaccggcggatctccgctgctttttcggggtgctccgcgatatacgcaaaaatatcggcagaagccacttccatgcggtcgatgcgctttgtcatcacctcgtccggaatgcggatgttcacgtcgcgcagctcatgcagatatttgtagccttcctcaatgatcttgtccacctcgggatcgccggtggagacctttttctgcggctccgctttcggctccggcttcttttcgggctcgggctttttctccggctgtacggattccgccggcacataatactttttgcccttgaaaattttgccgccgatgaaaaacgccgccgcacccaccacaacaaacgtgatgaggtcctgccagcggtaaagcgggccgttcagcgcatacagcatgcacacgatgcccgtcagccaatagcggccgtttgagggcttgtacttttcaatcatgtcctgcttgcgcggcgcttttttcggctgctgcacgggcgcaccgttctgcgaaacggtatttcgcggcgctgtgccgcgcggcggattatacggtccgccgggcgcgctgctcggagcctgattcgggtttgtattcgggcgcttgtaattcgagtacgccgtctgcgtgtaggaatagtggtacgtaccgtccggattctgcccctgcggcgactgataatttgtccgcgcgttcgtgttaaacttgcggtttacggtctccgccacacggttcacttcgtttacaacgccgttcaccgcaccctgcacctcgcgggaaatcttctccccgtcgaggttattcacgctctccgtcaccttgtcgcccaccttgtggataacgcggtacgtcgcggagttttcaaactcgttttggagcggattcgtgtaattcgcgccgttcggcgtattcgtgtttctgttttgttcgttcggattttgtgtgttcgtttttggcaccgcctttctaacggtaatgcttcataaatctccattttttctgtggtgtgtcccggcaaagtcgggacacacccacttattcgactttactctattattgtacgtttttctgaaacccgggtcaagaacttccgggtgaatttcagagttttttcaggaattctccggcgccggagtcggcgttacctgcacgggatcttttccgtcctgcacaaggtaatattccaccgtctcttcacccgctatgtgcagcacgttgtactttacatccagcaaaaattccggtgccgcgccgaaggattgtaatgacgcctccgcgtcaaagcgcgtcattagaagctgccggtcggagggctcgcccgccgtgccgcgcagaccgagtacaacgcccgcgaaaatcaggattgcagaaagcagccacgcgccgagcggggccatccagtttgcacccgtaagcttgcccagtacactcacgcgtctctttaaaaggctgcgcgtcagtgtaaaatgcagcaccggcaccacaatcatcaaaagcgaaaaaagccaattctgcctgatgatctgcacaagcccggctaaaaattccagcccttttataccggccttcagtcccatgcagacgccgaacatctgccggtataaaaactgcacgaacgtaaagccccaaaggcccaccgtccacacggttaaaagcagaaagttcagcccttttaacggcgtcgtgcgcgaaagcgccagcgcgatgccgccaagtcccagcgccatccataccttcacgggcgttatgggcatatgcgcaaaatatgcaaaaataaattcactgtataaaaccgataaaaacggaagcagcgatgccaaaaccgagacgcttttctcccgttccgcagcctgatgccgcgccatacttcccacctccaaatgcgaaacgtgctgttttcagccgctttgttcacagtatactataaaaacttgaacttttcaatcatttccggcaaaccgaagaaaacgcatcgttttcggcgtttattccgcaaaaagacgggcattctatgggtaacgcggcataccgccgcgcacgctatttttgtagaaaggatcgatccgatatgaaaagaatttttcccgctctgcttgctttgctcttggtgctttcattcacgggctgcgcaagccgaacgaccgaaagctcgtcctcctcatctgccgcaagtgaaaagcccgcgcagtctgcgtcgccttctccggatgtgagtgaatccccgaacgacacctccgttatgccggagaccgcgctcggcctttccgccttccgcgatgctctacgtgaagcctatggcgacaaatattaccccgatacgaaactgaccgaagatgaaattcgctcagagctcggcatggacgactcgctttacgaagaggtatacgctgaaaacaccgcgcagaaggcccacccggatacgttcatcgccgtaaaagtcaaagaaggcaaaacggacgaagtcaaagagaagctcgcggcttataagcagcgcctgcttgcagatgaagatttcaccgcaagcaaagacaaaatagaggccgccgaaatttacgccgacggcgattacgtattcttccttctgctcggcgagccggaaacgagcggtgaaagcagtgagggcatggcagaggccttcggtaaagaagtacaacacggcatagacgccattaaaaaggtcattggcatggagtaattttgtgtcgaaaagctccgtaaaacgccccttatatccttgaaatacctccgcctgcgtggtatactcctaatgtatatgcacgcgggcgggcttttttgtccgcctttttgaaaggagctttcatgttcaaagattccgaaaagatccgcgccgccatttttgatgtggacggcacgcttttaaacagcacacccatgtggaataaactcacgttcgcgttcgccgaaaaaatgggcatcgcagcacccgacgatctattccgcaccctaaacagcctctcgctcgaacagtgcgccaagtattaccacgacgtgctccatgttgagggcaccgttgaggaaattcatgagggcatcatcgcactcgcccgcgagggctacgccaaagaagtgcccgagatcaccggcgcggcggcgtttttaaaagcgctctcagagcgccacattcccgcagccgtcgcaaccgcctcggacattgcgtccttaaggcccgcgtttgatcgccttaatatgtcgccgtacatttccgtcatcgaaagctgcaccaccatcggcaaaagcaaggagcacccggatatttatttaaagtgcgcagccgatttaaacgccgccccgcatgagaccgttgtgtttgaagacgcgctctacgccgccaaaacggcaaaagccgccggcttttcggtcatcggcgtgttgagcgaagctgtggaagaaagcgaccgcatagcgcttcaaaagctctgcgaccgctgcatcacagactacacagcgcttttgggcgaacttttgccgcccgaagaccgataaaaaccgccaaacggacggttctcttttgggaacagaacaggcgcacgcagccgtgtcacgcgaagctctgttttgatgatataaatttttgaaaatcaagctttaggatattttggaggagttatgttcaaaaaatacaaagaaaaattcatcggcgaccgggagttttacgcaaacctcatccgcctcatcatcccgatgatcgtgcagcagggcatcacaagctttgtcagcctgctcgataacgtcatggtcggccgcctcggcaccgaatccatgagcggtgtcgccatcgtcaatcagcttttgttcgtctttaacctcaccatcttcggcggccttgcgggcgcgtccattttcggcgcgcagttctacggcaagggcgaccacaagggcgtgcgctatgcgctgcgcttcaagctcattttcagcgttttaatggccgtcatcgccatcgtcgcgcttctgttcttcaataacccgctcatttcgctgttcctcacggaaagcgaatccggcggcgacctcgtcttaacgctttccgaagcgaagaactacctgttcgtcatgctgatcggtctcataccgttcagcttctcgcaaagctattccagcactctgcgtgaaaccggcgagaccgtatccccgatgaccgccagcatcatcgccatcgtcacaaactttgtcttaaactacattctcattttcggcagctttggcgcaccacgcctcggcgtcgtcggcgcagccatcgccaccgttatcgcaagatatatcgaagcaatctatctcatcctacatacccaccgccgcgaaaaaacatttatttttgcacagggcttatataaaagcctgtatttgcccggtgccgtcgtgaaaaagatcctcctcaccggcacgccgctcatgcttaacgagctcttctggagtatcggcaccacgatgatcagccaaagctactccacgcgcggtctgaccgtcgtcgccgccacgaacattgccggcacagtatggaacctcttctgcgtcatcatgttcgccatgggcaatgccgtttccattatcatcggccagcagctcggcgcgggtgagattgaagaagcaaagcgcacggataataagcttctgttctttaccgtcgtgctgcacatcggcgttggcgcgctcatcgccatcaccgcgccgtttatcccgctcatttacaataccacgccggaggtacagcgcctcacaaccgagcttctgttcgtcgccggcgcagcactgcccattcaggcatttgcgcatgtcacgtacttcaccattcgctccggcggcaaaacgttcatcacgtttctgtttgactgcgtatttacttggctcatcccgctgcccatcgcgtttttctgcagccgctacacagcgctgtccatcatcggcatctatgcgctcgtgcagtttgcagatatcatcaaggtcatcatcggctccatcctgctgcgctcgggcatttgggcgaacaatgtggtttccgacgttgactgatcccacatgaaggagaatttattatggaacaaagcaagatagaccgcatcaacgccctcgcaaagaaagcaaaaaccgagggtctcaccgaagcggagaccgcagagcgcaaagccctgcgcgaagaatatatcgcagcctaccgcaaaaacctgcgtacacagctcgataacatggtcatcgtagagccgaacggcgagcgccgtaaattaaagccgaaaaaataagcgaaagaaggcatccttatgctgtataaatacgagatgcacgtgcacgacagcctgtgcagccgctgcggacacaaccctccggaggtcattgccaaggtctattatgaccgcggctacgccggcatgtgctttacaaaccactttttgcagggcagcaccgccattgataaaaccctgccgtgggaggataaagtccgcgtctactggaacgcctacctgcgcgtaaaggactgggcaaaggataaggatttcgatattctgttcggccttgagcaccactacggctccggcaaagaggtgctcacctacggcatcgatctcgattttctgctcgcacacccgaatatcgacgtcgcgcccatcaaagactattgcgacgccgtgcacgaagcgggcggattcatctcgcaggcgcatccgttccgccgtgcgccgtacattgaccccaacgtactcccgcagccggagctattggacgccgccgaaatttacaacgccggcaactccgacgaagacaacagccgcggctatgattttgcaaaaaggaaccacctttacggcaccagcggcggcgatacgcacgaacagcacgaatcaaacatcggcaaagccggcatggcgttcccgtaccgcatcaaaaccgaaaaagagcttgcaaacgcgctgttccgccacgacggacgctgtatcatcaacggtgtcattcagcccccgcaagatatttgacccgatttctgaaaggaaaacacatggaatcactcaaggaactttaccgcatcggcacaggtccctccagctcccacaccatggggccggagcgcgccgcgcaccgctttaaagaaaaatacccgcaggcagaccgttttctcgtcactctgtacggttcgctcgccaaaacgggcaaaggccacttgacggacgacattctcgtcaagacctttgcaccgctgccggtggaaattcggttcgacctttcggataagcctctcccccacccgaatacgctggagctcaccgccattgaaaacgacaaagagatcggctttgagcgcgtcatgagcgtcggcggcggtaaaattctctcggagggcgaaacggaagacgctcccgcagacgtttacccgctttccacattcgccgacatcaaagcttactgcgcctcgcgtcacatgcgcctttggcagtatgcggaagagtgcgagggcacggagatttgggactatttaaaggaagtctggcgctgtatgcgcgaagccgtcacccgcggtttagagaccgaaggcaccttaaaaggcggtttagacgtgcagcgcaaagcgaaaatgctctaccgtcagaatcacatcgatgaaagcgccgaaacgcgcgaaaaccgccttgtgtgcgcctatgcctacgccgtcagcgaagaaaacgcggcaggcggcatcatcgtcaccgcgcccacgtgcggttcctgcggcgtgctgccgagcgttcttttgtatatgcaggaacgccgcggctttacggataccgagattctccacgcgctcgcggcgggcggcatcatcggcaatcttatcaagacgaacgcctccatcagcggcgcggagtgcggctgtcaggcggagatcggcagcgcatgttccatggcggcggcagccctcgcggagctgcacggcatggagttagaccagattgaatacgctgccgaggtcgctatggagcaccacctcggccttacgtgcgaccccgtgcgcggactcgtgcagattccgtgcatcgaacgcaacgccgtcgccgccatgcgcgccatcaacgcgctgagccttgcgaattttctcacctatacaagaaaaatctcgttcgacgtcgtcgtaaacaccatgtacgagaccggcagagatttgttctccaaatacagagaaaccggcgaaggcgggcttgcgaagtattatacgggtaagaaataacacaaagcttacgtgaaagcatgtctaaaagtttttgatccaacttttttcaaaaagttggtcaggttccaagggtgaagcccttggtcgctttccgcagaaagcgaaacccttttgcctacccaaaatcaggactgggagaaaccaatgcttcgcattgctattaagcagtccggtggactgtttactcgtgggagacccaattagggggtctcccgaagagcttgcaaaaagcaagctcttaaaaagaacacatatcaaaaagtaaagcgcacagcctcgaaaagaagctgtgcgctttcgttttatataaattctttactgattcaagatatccataaactcttcgccggtgatggtctctttctcatacaggaactttgcaagctcgtcgagcttcgggcggttctcctgcaaaatccgcaccgccttcgcgtgctgcttcttcacaaggtcaaccacctgtctgtcgatctctgcctgcgtttcggcgctgcacgccagtgaagcatcgccgccgaggtactggttcgtcaccgtctccagcgcgaccatatcaaagttgtcgctcatgccgtagcgcgtgatcattgcgcgggcaagctttgtcgcctgctcaatgtcattcgatgcacccgttgtaacggaatggaacacgacttcctccgcggctctgccgcccgtgaacgtcgcaatcttgttttcaatctcctcgcggctcatcaggtaatggttgccgtcctccacctgcatggtgtagcccagcgcgccggacgtgcgcggaataatcgtaatcttctgcaccggcgcggagttcgtctgcttcgccgccaccagtgcgtgaccgatttcgtggtacgaaacgatgagcttttcgcgcgttgtgagaatagagtttttcttttgatagcctgcaataacaacctcgatgctctcctcaaggtcggcctgcgttgcggaagcacggccgtcacgcacggcgcgcagcgcagcttcgttcacaatgttcgcaagctctgcgccggaagcgccggaagccatgcgcgcgatcttcgcaaggtcaacgtcgggtgcaaccttaatcttcttcgcgtgtacacgcaaaatcgcctcacggcccgcaaggtcgggcagctccaccggcacgcggcggtcaaaacgacccggacgcgtcaaggcggggtcaagcgactccgggcggttcgtcgcggcaaggataataacgccgttgttgccctcaaagccgtccatttcggtcaaaagctgatttaaggtctgctcgcgctcatcgttcgtgctcagctgattatcgcgctttttaccgatagcgtcgatttcatcgatgaacacgatgcaaggcgctttttcctttgcctgcctaaagaggtcacgtactttcgatgcgcccatgccaacgaacatctcgacaaattccgagccggacatggagaaaaacggcacgctcgcttcgccggcgaccgccttagccagcattgttttgccggttcccggagggcccacaagcaaaatgcccttcggcatggaagcgccaatctctttatatttattcgggttatgcaggtaatcgacaacttcggaaaggttctccttcgcttcgtcctcgcccgcaacgtccgcaaacttaatgccgtccgaagactgcacatacacctttgcactgctcttgcccatgtcgaacttcatggcgttcgggccgcccattttcttcatgagctgccgcgacaaaagctgtcccagcaccacaaagagcacaaccggcagcacccagctcacgataaagctcatcagcggggacatctgctccacaatctcgccggaaaactccgcgccggaatcgtaaagacgctgtacaaggccgtcgtcattcaaaaggccggttttataaattttgctcttgtccttatttgtgaacaaaatctggttgtcttcaatctccacctggccgatttctttgttctccgtcatcttgatgaacgtgccatagtccacttcctccacctggtgctgtgtaatcagtggcatcaccagcatgtttaaaagcagcaaaacgaccatcgcaatgccgtaataaaaaataagcggctttttcggcgttttcacttcgttcatgttctctctcctctcgcgcgcgattaaaataagcgcgatattattttagcctattctatgcgttttttggcggaaagtcaatctcaaaatttccaacttttcgtgaacaaatcatgaaagcacgcggatattctcctgcaccgttcccgcgggcagcgctcctctccagtcataataagtcgcttctcggcaaggccggcaaaaactcccgagaaaatatcgtccttgccacaaaacagcaccgctcgggttgacacttcaccccggcggtgctatgctttttccaaatttacgatttgtatttgagcttttagggggtattttcatgagcactgttttgattcgtgacgccaagctttccgacgcaccgcgccttctggaaatttacagctattacgtaaaaaacaccgccatcacctttgagtacaacgtgccgtcgctcgaagaattccgacaccgcatgaaaaacatcatgctgcgctacccgtacatcgtcctcgaagcggacggcaaggtcatgggctacgcctacgcgggctcattcatcggccgcgccgcctacgattggtcatgcgaaatgaccgtttaccttgaccgtaccgccaaaaaactgggcttcggcagaaagatctacgaagccatggagcagcgcctcaaagatatgggcattttaaacctttacgcctgcatcggctatatcgacaaggaggacgagtacctgaaccacaacagtgccgattttcacgctcacctcggctacaaaacggtcggtacgttcaaaaaatgcggctataaattcggccgctggtacgacatgatctggatggaaaagtgcatcggcacgcacaccgataccccagcccccgtccgctttttgaccgatgcacccgacccaaacgcgcattgattttatgcaccccataccttaccgcatggcaagcagcgctgcggacttcttcaatcttgttttcgcgcggtttgcgcaggcggaaagctccgcggcggcgcggcaatcgtccatttttaaaatgcgttccaagcgtaagagggccttttcgtcccactctgccttgttctgcgccgcagcgcccagcagcgccatcgcatccagataaaccttttcgggcgtgcgcaggcggcgcagcgtctttaaaagcgttttgcaatccatctggccctcgctctgcttgtgtgcaaaggcgaaaagctcgtccgggcggtcgtgcagcgtctcgtacacagcctgcaccatatcggtgctcatcatctcgcccagcacctcacgctccgtgttttcttcgcccgcaagactcgcgccaagcgccatgctgccgtcttcgccctcaagctcacggtctaagctgtccggcacggcttttttaaagcgatcgccgaggatattattcatcacatacgcgaacagcgtcgggataaaatgcgcctccccctttttgaaaaataaatcaagacgcactgcgcccttgttttcgccctttgtaatggggctcatcagaccgatgaacgtctcgtgcgtgtattcggtctgcgctgtctccgcttcgccgccgcaaaaagcgcacagtgcgcgcagctttacgcccgccgcagcactgcccaaaacgtcttttaaaagaaacgcatacagggtttcctgaaagcgtgcggaaagggccgcgtccgcccacaacacagcaacgctgttttttccgctttcgtacacttcctttaaaaccgcgcggaacgctgtttcctccgcgctcttttcaaataccttcgctgccatatccgttcctccttaaagcgttttttcttgtgctttaaggataaaaaacggttctcggtaccatcccgaaacggtctcgattttttctcgattttcgccgaacagcgttgaagaaccgcacattcaatgctataatcgggttatccataaaaaaggaggaaacgcggtggacgagctttataaaatccaaaacgtcacgtataacgccacgggcggtactttaaaaaacgataaagcggtcatcgacctcaccgcacagcaaaaccgcctgctgcgctaccttgtcttaaacgccgggcaaacgctcacaaaagagcagatcaccgcgcatgtgtgggggtatgatgtcgattcggacgtcagcaacctcatttacgataccgtctccgccgtgcgccgcctgttgaaaaaagccgggctaaacggcgccgtcaccaccaaaaccggcatcggctacgcgtttacggaaagcgtcgaaaaaatcaaacccacagccgccaaaaccgaagaaacatgcgaaagcctgccgcccgtttttgcggaaagtgccccgaagttcacgcttgatacggtctatctgctgcttatgggcgacagtatgtataaaaaagcgtggtttttgcagtccgtcggctatatcgaaaagcttccgccgctcagcttggagcccggctcagccgacaccgtcgccgaggacgcgttttacagctggattttacccgaaagcatctgggcgcgcattttgtgcacataccccgaagaaagcgaccgcagagcgttgtatggcggcgaaggtacaagcgaactgctcctcgacttaaagcaggattttcaaaacgacagcggctggcgcgggcgtgagcttacacgaaactgcaaaacgtatttggagcgtatgctgattccgagcgtgattgagaccacactcggcgccgtgctgcaaaattcgccgcagctaagcgagctttaccacctgtggcaacggtgcagcgaagaaaataacgtccaccgcggcgtcgcactcgtcatcctctgcgccctgctcggcgagcggaatttcaaaatgcttgcggaaacctgcgatgtcattgaactgctgaatgaaaatttctgaccgcaaacgacgaataaagtttttgatcgaccttttttcaaaaaggtcgtggggtctcggggcaatgccctgagtcgccattcgcaaatggcgaaacccttttgcctctaaaaaatcaggaggggaaaacggaacagtccggtggactgttccgtttaggggaaccctattaaggggttcccctaacggctctcccagagccgttcaaaaaacaaactatcccatataaaaagaggtgcaaagccacatggaaacccctgttaaaactatcgccccaaacacactgcatatctgctccgccgcagaagcgctcgctttgctcagaaagcacggcgggcacggcagcgccgcgttcatgcgcagccttgcggatgccgtttcggatgaaaacaaccacatcaccggcactgtcagcgatttcaacaacctcatcgaccgctttgaggtgctcggcgattatttcgacgctttgcgcgtgtgtgattttgcacttaaaatctatccccgcagcgcaacgttgctcgccatcacgctcaatacctgcgcccgcagcggcgcggacggcgaaacctatcttgccgcagccgaaagcctcgggcgcgaaaactggaacgaaccgcggctttttaaagacgccgccgagtattgccgcacccgcgccttgtgctgcccgccggagcagaccgaagcgtattttgaaaaagctctctccgtctgccgtgattttcagcgtattttcccgcttgatgagcgtggttacatgaaagaagccaccgtgctgctcgacaaaaaccgcaccgcagacgccgaaaacgtcctgcgccgcgtcatttttgagaaaatcaccgcaaacggccgcccgcagcccttaaacgccgcaaactgctgcaagctgtaccttacggaaattctgaagaaaagccttgaatacgacctcatcctgcgcattgcacaaaagggactttcgttctctgccgccgagcagaattccgagcacatgggctacttcagctaccgtctggcgctcgccaaaacagcgcttgtcattgaaagcgattaccgcaataaggccgatattgaagaagcgctcacgtgctgccagcgcgcgttcgaccttgtgacgttccaaagctacgcggatgatttaaagcgctgctacgtacagctgtgcgaaaacccgcagaatcccatcgacctcaaaacgcaccgccttgtaaagcacgttttaaacaccgcagagaccgcttccgcaccgacacaaaactaaatttgagctttaaaatgccttgttctgtgaaaagaacagggcatttttcttttgtgcgctcaaaatttcgtctgcgccgttcgtagtaaaggtgaaaacaaacggatctaaggaggtttttactttgcctgcacaaaacagcacccaaacctacgaaatgctcaaaacatatttggatgagaccgcggatagctttgaaaagctcgacgaggaacccggttttttgtaccgcaaaacggacggccgtacctcgctcgttttctgcgcccgcgtggataaagagctcggctttctgcttttaagcgcctaccccggcattttagtccgcacgtcttacgtgccgatggtcgccgattactgccagcgcatcacgccggaggtcggcgtcgtgtgtgtagaatccaatttgtgcgaggtctattaccgcacggaggtcgcctttgagcacgcgcccgtctcccgcgccacactggagcttctggagcgcaccgcgttcgccgcactcacgccgcatatcagcgctttgcgttcgctcagcgcgggcgtactgccggaggcgctcccggagccgcaggagatccacattccgtctcccgccccgtcccacgcggaagattttctgcccctcatggaggaatattttcaaaaaacgcactttaccgtgcttgcaaaacatgcgcccgatgaaaccggcgcgtgctacctctacgagtttctggccgcgcaccgccgctggaagctgcatgtcaccttaaatgatgagaagacctttttcatcctgcgcctgttccccggccgcaacgcccttgtttttgatccacgctacctgcacgccgccgcgcagatctgcaacgcggaaaacgattccgtaaagtccggcgcactcttcgtcggccgccgcccggagggtctgtgcgcaaaaattgccctttccgcactggaagctcctacatcactcggagaaacgctgtattccgccgtttccatcctcgtttcgcttttgtatagccgcgaagcagagctgcaaaaagccgctgcgggcgtgatttttccgacagggtttgatgctgagaagctaaagccctccgcgtcagaccgcaaaaaacggcttgaagacgcgcagcgctttttggccatgaccgcccgtccaaagccgcttgaccccgcgtctgccgaaaaagaattcgatgccctgttcggcggcgacatcgccgagaccgatgacgacgaccccgaaccgttccgataaggaggctcttatgccggattattacattgccgaagacggcaccatccacgaccgcgaagccgagcaccgcagccgcacacagcacaccgcagcccccgccgttgccgataccaccgtcgaggagactcccgaagtcagctttacgcgccaattcgtttactggcttttcgcgctttccgcttccgtctttgctgctgtttgcgtgtttcatgagatgcaggcagcgttcaccccgcccgcgcacctcgattttttggaggactacgtgcagcagttcgtgtttgaacacgccaaagcgctcgttatcatcataaccatattctgcatctatctttacggcaaaacaggcgcgaaaaaacaccgctataacgtgcttgcctacctctacaccgtctccatctgctgctttgcgccgcccaccgccgtgttcgtactcatggccgcgcccatccttatggcgctcgcgcttgccgtgctcgtgctcggcatcgtcgggctcgtcaaaatggcgttcggctaaatttttcgaaaaggagttttcccatgaatgcaccgttttccgccgttttccgcacgttaaacggcaccgccgcttcgctttccgcgctgcacgaaacgctccgccgcatggaagcggagacccgcaccacgctgcgcctgaacgaccaaaacagagaacgccgcgtctgcgccgtacaggacgccaccgacgagcttttagaagacttcgcgcacgagtacgatacacttaaaggcgatgccgaaagcctgctttccgccgccgagattgcgatgaacgacattctcgatccgcactttcaccgcatgcagccgcagtatttttccgccgccatgcaaaagccgtacaacaccgcaaacgtgtgcgcggaagcactcattacacgcatgcaaaaagcgctttccgccattcaagccggcgcaaagaaaatcaaaaacgcgtttttgctgccggacgccgcggggctcatcggctccgtttctccggatttccgcaaatcgctctacatgcccatcctcgacgcctacgcgcacatgcgccgctgcgcggaggccatagaaaacgcgcccgcgtttaccgaaaaaaccgcccgcgcccacgctgtctgcacgcgcaaaacgcggcagattgaaaccgaatgtaccaatcgccgagcggagattctgcaaaaaataaaggccgataccggagctgcaatcacccgcacaaacgctgtgctctgcactccgccaagcgctgcaattttcgccgaaaacgccgaacatgccccgctttccctcggcacgctgcgccttgcactcccctccggcaaaatgtttacagcgccgcttacctgtacaaagctcgactgcagcgtgctgtttttaacggataacaccgccccgcacgcgctcttttgcagtttggcgctcgatctgcttaaaagcgatcctgctgccgtcgtgcaccttgcagatcccgcccactgcggcaatgcgtacaaggacgttttcgccgcgtttacgccgagcggccgcgcggaaatttggtgcagtgcacaggattttacccgtggcatagaagccttgtgtcgcgccgccgcagaaaatacgccgaactcgatgcactacgtcttcatcgaaaacatggagcagaatatcccggagcagacgctggaagaccttatccggctcatgcgtgccaacacctgcgtgcgcgtgctcgtttccgtgcgcaaggcgatctccctgccgcacggttttcaacagaaattccccgcgctcgtgcaaaacgccgcgtgctgcaccgcaaaaaacggcggaatttacatttccgaagacgtttttaccgtcccgccggaggatctccctgcccgccgcgcagcagcgttttctgccgtcaccgcgcaggttaaaaaagccgccgtgctgcccctcaacgcccgtttgccgcatgccgaaggctggcagaaaaagagcagcgaagcgggcattttccttcccatcggccaaagcgatgtcactcgtcagcccgtcacgcttgcgtttacggaagaaaagccgtatgcgctcgtcatcggcgatgtaaactccggcaaaagcgcgcttctgcataccgttgccttgcagattttcgcaaactacacgccgggcgaagtgaagctcgccattgccgatttcaaagagggcgcggagttcgcgctttacggcgcatcgcgcctgcccgcagtcgaagccgtcgttgaaaacgatgaccccgattgcgccgcatcctttcttcggtactacgtttcggagctgcaccgtcgccaaacctgctttacgacgctttccgccgagaccggccgcctcatccgcaagtacgagacctaccgcgccgtgcagcgcgaaacgggtgcgttgtccgaaattctgccgcgcattttgcttatgattgacgaataccagtcgctttttgagggcaacacagagaccgccgcgcttttaagcgagcttgttcgcaaagggcgcacctacggcgtgcacctcatcatggcgagccagcgcggcgtaagcgaaagcgcgcgcaacacgttcacggccgagctgagggaccacttttccacacgcctcgtttttcgctgcccgcctgccgccgcccgccgccttttcagcgaccgcgcggtcgataccgggcgcgaaaacaccggcattgcggctgccgtgctgctgaaaaccggccacgcgcttttaaacgacgaagcgggccaaaccgagcgcgccaccgtctccgtgcaatgcttttacgccggggatgacctcatcgggcgcatgtgcagcctgctgccacgcgtaaacggcacgggcgaaaccgcgtggctgcggtataacgccgcctcccgtgctgcaccgagcgcactcccgcacggcgaagtcaccttcggcgactccgtatgcctgcataaggaccgcgccgcttccgatgcggatagcttaaaagacgacggccttgtctcgtttacaccgaacggcacgcacattctgtgcacgggcagcgacctgcgcgtgccggcctctgtgctgtgcagcgccgcgcggtttgcggaacaggaagggctttcgctgcatattttctgcgcagaaagtcacccgctactgcggctttgcccggaaaccgccacggtttataccacgcttgccgcacagagagaagcgctttcccgtcagcttcgggaaggtcaaaaccgcgccgtcaacgtgtttttggagatgagcgcggaaaaagaattcacccagccgctcggcacactgcgcccctccgcggacgcggcgcttctcaaaaacgccgtcgcacacagccgcctttccgtcgtgtttgagcgccggtgcaaaatcgtgcgcagcgagcttccccagcttttggcgcttgcgcccatccacattacagccgtcggcgacagcgaaaatctgcgtgccgccctgtccgataccgcccgcattacagcaacagcctttgacgtcccgcaaaaggacagcattcacgcgtattactgtaatcgggatacggaaaaatggggtaagattgtgctgtttcagcccttttccccttgtcaaggacatcttttcaaatctccttgaggtgtcgcaaaaagcagacacctgccctttaaaacctcgttttccgaaaaaatctttgaatgttcgattgacaaattgcgaacgtttgtttataatacgagatagcaaagaaacaaacgttcgtaaagcgctgatatgccgcacagaaccgtctgtaccatgcatcaacgcacaagcgaaactcggatgggggtatttttatgattctgtttctctttagtattgccgtttcctgcctgttaatcgcgcttgcacagggtgcggttttcttgatctctcttgtagcgaaatctgcgcaccgcgcgaaaagcacctccgtgcgccgcagtgtgcagaattttacggggctgccgaaccgtgaagaagtgaagaacatatattccctttcagaccagtttgcagaccgcctgcgagaggtcgtgcagtcttgaccgatacggaattgaacgccgtgaaagcgtttttatccgcttaccgctacacggagctcgacctccgtgtacgcagggcggagctcacccggctgacagcgcgcaaagaagcgctgattttggaaggaaataccgatcttctttttcacttagagcacgcgatatgcgcagcaaaagacgccatacgcgtgctttgcacaaggcaggcagaaattgaagccgccatagacacggtggaaagtgccgctttgcgtgagattttgacacagcactacatctgtgcgctcgacctcaaggagattgcagagcgcatgcactactcggaccgccacatgcggcggctgcaccgaaaggcgattgaaagcgtttcgctttccgccgtttcgccctttaaaaagcggggatcctccccgcgcacacttccccttgtcaaaagaatttgagactgccgcggcaaagtcgtggggtctcttttcttttcctgaatttcggcatctgctccgcacggcagacgccgcccgttttgccgtgccgcaccgcggtgaaaacggagactttgaaaaggagtttatttggaatttatgaaaccgactatgttaaaaaccgcttttaccgtggtgttggcagggctttcctcgtactttggtatgctgacgcagccgcttttggtgttgttttttgccatggtactcgattacctcactggcatgacaaaagcctatattttctcacagctcagctcgcgcatcggtgtgaagggtattctcaaaaagctttgctatatggccatggtcgccgtaggcgcggcggtggattacctgctgcacggcgcactgaagcaggcaggcatcgacctgcacatcgagcttttctgcggcctgctcgtcaccgtttggctcatcatcaacgagctcatctcggtgctggaaaacttagccgccatcggtgtaccgggctttcctcgcctcaatcgattactttctcgcctgaaaagcaccgtgaacgaaaaggaagacgaacatgacacatgaaatgagattgaaaaactgcaatgcctatcatgccgaggcccctttgagctttggcacaaagggcagcaaagtcgaaatccggggcgtaaaagcgtaaggaggagctatgataccgatcagagaaaatcttgtgccaaaggacaaatatgccattaaatgcccgtacacccgcacaccgacgcgcgttgttatccacaacacggcaaacgatgcgcccgccgcaaatgagatctcctacatgcggtataacgaccttgagatctcgtttcactacgcggtggacgatgtaaacattgtgcagggcatcccggaaaaccgcaacgcgtgggcaagcggcgacgggcacggcaagggcaacatggagggcatccatattgaaatttgttattccaaatcgggcggtaaaaagttcgataaggccgagcagaatgcggccgagttcaccgcaagcttgctcaaaaagtacggctgggccattgataaggtgacaaagcaccgggactatgacggcaagtactgcccgcacaggacgctcgaccgcggctggcagcgctttttgagcatggtgaaacgctatatggagccggcaaaagcgcccgtcgcgagcaagtttaccccctatctcatccgcaaaaattgccgcgatgcgctcaacatccgcaagggtccgagcacgaactacggcattttagggcagatcaaagatacgctgcgctacacaatcgttgaagagcgcagcggccccggcttccataaaggctggggccgtctcaaagccggcggctgggtcgcactcgactgggtgaagaaggcttaaactcattgcagcgcacaaattatacatttcaaatgtgacgttatgcgctgcaatggcagatttactcgaacgaaagtgggcacgctttttccctctgccgcttatactggggttaggtaaaaggagggactttatggacagagacgtcaagcagaacatagcggagaacgcgccgattgaaaatccgccggaaggcggcgcggggcgcgatcctttgcaggatctctcacccgaggcatgcacgtttgaggtgtttcaacagctaaactctaaaacaggcacgctgcgcgtgcaggcgtatgcggggcagcggacattccccgtccccggcgcttcggtacttgtgacgcacgactttgcggacggcacgcggcggttttctgccggggtgacggacgagagcggtgttttcggcgacatcttgctgcccgcgccgaataacgcgttggcgcagtcgccgacgggcgagatgccgtatgcgctttacgatatacgcgtgagccacccgggatgccgcacggaaatttaccgcgcggtgcctgttttccccggtgtgacgtcgatacagccggtgcaatttttggcggtcggtgaggggtgatgctatgccgaacaatatagacacgcccgttgtgccggaatacatcacggtgcaccttgggttgccggaccaaccggccgagaatgtgcgcgtaccgtttgtggcgtacattaaaaacgttgcttcgagcgagatctacccgaactggccggaaagcgcgatacatgcgaatattctggcgcagatttcttacgcaatgaaccgcatttacacggagtattaccgcagccgcgggtatgactttgacatcacctcgacaacgcagtacgatcagaagtttattttgaaccgcgatatttttgaaaacatctcgcagatcgtcgatcatattttcaacgattatgtcgtaaagcaaggcacggtgcagccgtattttacgcagtactgcaacggcacaacctcgacatgcccggggctttcgcagtggggcacggtgggattagcacggcaggggcttgtgccgtatgagattttacaacatttctacggcgatgacatcaacattgtgttcaacgcacctgttggggacaacgaggaatcataccccggtgtggcgttaagactcgggagcatcgtcgaaagtgtgcgcgtgctgcaaagggagctaaaccgcatcggcgacaattacccggcgattccgcgcattccgcagatcagcgtttattacgacctgccgaccgaaaatgcggtgcgggcgttccagagaattttcaatttaacgcccgacggcgtggttggtaaggcgacatggtacaaaatcaagctcatatacagcggcatcaagcaattaaacgagctgatgagcgagggcatcacgcccgaggatgccgagcgattctacccgccggagctgaaagagggagacagcggcaaggcggtagaacagatgcagaacttactgacgatcattgcgtattttgacaattccatccccctgcccgcgatgaacggcgtatttgacgcacggacgaaaaattcgctcacggccttccaaacgcagtacggactggagccgacgggcgtactcaaccggcaaagcgcgaatatgctgctttccgtttaccgcgacacgcgggcgatggcgacggaaaacgggaaatccgtaagccgtcttatctaccccgggcgggcaatcctcaggggacgcacaggcgcggatgtggaagatttgcaatcgctcattaaccgcgcagcggcacaaaacgcatttatcccgcaggtcgcggaggacgggatcttcggcgaggcaacggagaatgccgtgaaggccgtgcaggcgcacgaagggttagacgtgaatggcatcgtaggaccgctgacgtggcaggctttgctgcggcttagcgggctttctccgtagtgacaaaatgaaaaagcacgcaggaatttaagcctgcgtgcttttattttgccctaactattactctttgccgataaagatgtattcgcggataaggatgaggatgccgcagagggtgagggcggcactgacgatgaacagtgctaagatccaggaatcgaacagcgcggtgccgtagcggccgagatttgtccaccattccgtgagcgtctgcgcgtaaagacccgcgccgacgagcgttgcactgagcgagatgacgccgaaaatgagcaggaaccaaccgaaatgcatgcgcatgctttggcgcttcatttgcttttctgcggcgcgctgttccgtttctctgttgttttcggcgggggctgcgctttgcggggcttcgtcaatatccaataataaataatcggtcgtgacatggaaaatgcggcttagctgaataaccttttcggtatccggcacggcttcacccgtctcccttaattaaagatattgttgggtaaaaaagaaaggtcagtcgattttgccgatgaagcggtagtagatttctacttcctgctcacggcttccgtcctcgcccttgacagcttcgtggacggttattttttcaattagagtgttcagaagttcggcggtcagctccacagggttgacatactgtttcatcagggcaatccacttttcagcatccgctgcggtctgtacggcggcttccatcgtttcgtgaagctgtcttatttttgtttcaagctccttttgctcgttctggtacttctcggacagcatattgaagttatactcggttatgcgtccggcagaccagtcctcatacattttagcaaacagcccgtcaacctcggctttacgcttctctgcctttttcagctccgcagcctgctttttcttcgcagagtttctttccctgtcgctggcattgagcaggcgtttcagcagattgtcctcgtctttctgtgccagcatagaccagtattgcagtcttgcaagcacataggcatacagtacatcatagcggatatagtgcatggaacactggcgtaatccctgcccgtgcttgctgcaatggtagtacccgtatgggttcttattctgcttgttttccccataggctaaagaccatccgcagtctgcacattttatcaatcctgcgaaaatctgtgtcgtaccgtttctgcgtttcctgcgtctgcttgcaatcagctcctgaactttttggaacacttcttcagaaatgatggcttcgtgggtattttccacacgataccattcttcctgcggcttccgcacctttttcttgttcttgaatgaaatgttgctctgcttgttgtgaatgctgtgaccgatgtaggtttcctctttcaaaatgctcttgacctgtgctatcgtccacgcataggctttttctgcgggcgcaccggcgtagatattggcgaaagtcccgtatctttcatagttcagccagccgggggtaggtactttttcctccaccagaatccgtgtaatgctggcggctccacgcccgtgtacagcaaggtcaaaaatcttctctacaatccagcgtgtttccgggtcgatcagaagatgaccttttttgtccgggtcttttacatagcccagcggtgcataggctccatagtgtgcgccattggcaaatcttgtgtgcatggcagccttgacctttttgctggtctgtcgggcgtgcatttcattcaggatgtttaagaacggtgcaagctcgctttctccgttgatggtgtccacattgtcattgatggcaatgtagcgtactcccttgctggggaaatagatttccgtgtactgaccggtcaggatatagtttcttcccagacgggataagtcctttgtgacaacgcagttgattttcccgtcttcgatgtcatcaatcatcctttggaaacttggacgctcgaaatttgtcccactccatccgtcgtcaatgtactcgtctacaacggtcagcccatgctctgcggcatactgtctaagcatcatgcgctgggtctggatactgccgctttccccctgtaattcatcgtcacggctcaatctcaaatatagtgcagtgttataaatcgttgtattgtatggttgtttcacggttaaaaatcctccttctaaaagaaacaacccacgcttatacaatactcgctggtacaagtatatcataagcgtgggctgattgacagtcgttattccgtattttttcaggaagcggcggcagcgtgctggatcacatcttccagcaggctgtcaagcggcttcccatcctgtgcgaaatgctccgataccttgatacggactttccccatgacaaaatactgggtgccgtctttttcggtaagcagggtgccgctgtttttgttattgctctcgtttttgctttttgccataggcagttacctccataaatgaaatatgcccgacaagggaatgtcagacaggtgtacggccgcagactgtctccgtgtcaaccaaaccgtgtcaaccggcagaaaagactttgaaaacaatccacaggcgctctattattactttttactttttctttgatttcttggttgacatggttgacaaaggagagaaatgccccaaatatcaggcttttccccgtcaaccggctgtcaaccgaagcgtcaaccaaactgttaaccggtggcttttcagaatggtagttccatttgccgggcttcttcttccgtgatttcctgaaaaccgtccccctccggcgggtcttggttgacacgctcccagcctttttgagaaccgtatttcttataccgcttcgggcttttgtaggctgcccagccctgtatgatgccgcccgcaatgccggtattcataatctcgcagattgcccgtgtctcccagtctgccggggaatttaagttccccagcgcttcctcataaagctgcttggagcataccctgtcaccggtgtagtcctccaaataggcgtagatcatgccagcctgtgtgtcctcctgcatgaagtcctgctgatgggcgttcaggtatcggttcatttctatgctgaatgacagcttatacttcccactgcgataaatcgtcatggcttccgcccacatctgttcgatatacgccctcgccgccgcttcatcgtccagtatgtgaacctccgcccgttccgggtacaccgtcacggggagaaagcgccggttgccggtgcggtcacggggtaaaaagtcctgccggttggtcgtccctccgaatacacattgccgcagccggtctgccggatgtgtctcatacggcactttgtaggtttctttctggcggcttaagaatgacttgatttcctcaatactcttggcgttggctgtggcaatcatctccgacatctcgataatccaatgcccttgcagcttgcggtacacattttcatcgtccagctttttcaaatcgtctgaaaaccattcgtccctgcctgccagcagccggaaaaaggtagatttcccggctccctgaccaccaaccagacagagcatgacctcaaacttgctccccggtctgaatacccgccggatggctcccatcaggaacagtttcaaggcttcataggtgtattcgtccgtatcggctcccagaaagtgatgcagggcgtaacggatgcgctctgtgccgtcccattgcaggctgttcaggtaatccctgactggatggtagcggttttcattggcaacaatcttgatggcgctctgcacctttttctcgctggtaagcccgtaattttcttccagatacaaaagcaggtagttcatgtccatgtcggtcagcgtggtactggtgcgctcccagcccagcggcttcacaatgtcaatctgctccgtcaaaaggttcaggcgcagcgccccgcgaaacagagggtcacgctggaacaccgtcaggcagtttcggatgctgttcttcacgccgcctttctgcgtcccctctaatgtttcccggatttctgccggtgtctgcgccggttccattgtgtccatcgtccttttgaccgcttcctgcgtttccggcggcaagctctgaaattcgctgttcaagccgcaacacctcctttccctgtgtggcgatcaatgccgctttttcttctatttctccgtataacaaaatatccaaaaggtattctgtgtagcttatcctctgcaacgcttccacaaaaagaggatgccagatggcatcctgcggctgtggggcgtgtgctgttttccaatgctccagcaggcgcagataatcgcatagcacccggaaacaataccgttccgtttcctgaaatctctgctccgctgatttttgtcggggctgtgacctgttgtgacgcttcctatctggcggcgcattgccggatttctcataggaaacgccgaagtcctccgcaagcctgaccgcagcttcccgtttccccaatccatgcagcaaagcggcaaagtcgatcacatccccggaagccccgcagccgaagcagtaaaagcggctgtccactttcatgctgggcgtgcggtcattgtggaatggacagcagaccatgccgtttctccccacccggattccatagaatgaagcagcctgccgggtggtaacagactgtttcaccgcttcaaatacattcaaatgctccctccataaaaatactggtagcggtaaagctgccggttatatcatagctccatctcatgtttctttctctgtactgcctgtggctgctccctccggcgcagtgcggtatctacggcgttctgcacctgccgtagccgtatgacttcctcccggagtggcttgtgctgcggagacagttcggcatactctgtttttaactgtgcgtattcctgtttccatgctttcagggcaatgggttttccgtccagtttttctttcaaaatacggcgggcggcataaaacagccgtaactccgcatcgtgggatgtttcaaatttctccctctgtttcttaaacttgatattgttcaattccgtatgaacaggttttagccgctggtaattctcgccctcccgtatcaattcctgcaattcctttatccgggcagatttctttttcatggagtcgcttaacgcttcaaattcttcgttgacagaggaaagacgctcctgcaaatcctctaatgtgagcagcttgttttccgtcagataattgacggcttcggcaaactgctttaagtttccggttctggctttattgctccatgcccctgcgttgcgctggttgtaataagcgatcaacaggtcggcaaggctcggtgtctgcggtttggaaagttcttcttttacctctgccatccagacaaacagggctttgatcttcttcctcacatcctgcatgagccggttggtggctttaatccagcggttcagttcccctttctcggtgcggatgccctttgcttccatctgccggacattagctccctcgtggacagtaggtatcaggtcaagcccctgccgcacataggaacggtggtcgatacgcacatccagccctttttcctcaaattttgtattaacggcagccgcccactgctcccgccagtgttccagcgtttccggctcatgccagtctgttgtatggacagcgttaaacatataatcgccgtttttatcccggattcggtttccatcttcatcaagaagatattcccgacgctgtttttgtccccatgtgccatccgggttcaaagggcgcatggttgtcatcacatgaaaatgcgggttagggatgccgccgtcctctttctccgggctgtgaaaagcaaggtcggcaatcatgccttttgtcacaaactgctcctgtacgaacttcctcgccagctccatgttttcttccagcgtcaattcattctgcatggcaatatcaaaggaataggcaagctgtgcttttggatgtttctcgcagttctccacagcattccagagggtcgcccggtcaagatatatttccggcgcatggggcggcagcatgatttccgaagcgatcacgccgccctttttggtgtagtcgctgacttctccatagtagctgctgtaaagacgctccccggctcgataggctgcgctggcaatggcgctctgaccggcgctgcgcttgatctgtgcgattgaaaaatgataaagtgctatccttagtcaccgcctttctcctgcccggaaatacgggcgtggttctctgtggcagaccggatgaaatgctccgcctgcggcagattcaaaatgctttccatgagggaataaaattccgcttcggatagctcctttgtctgtggtgcaatgctctcaatagctgccccacgggtaatcagccggtgcgtcctctgtttccgggaaccgctttccagatacgcctgccggtttttcaaacgctgcattttccgtttttcctgttccagcaggacagtggttttttcatattcctgcttcaactgttccaaagatttttccatgttctcacatcctttgctgataagataaagaaagaccatccgcagacagtccgtgtgtcagtgcttctataaaacccgatgaaaagggaaaaccgcagagcggatttctctttgcggcgggtacacaggggatagccgctttagcggcgcaagggggtgtagccaccttgtcggagcgaagcgaacgcagacctcggattgctgattttatcagcggcagaggtaagctccgcaggacgcacgatacatggtctttagactatgtatagaagtgcgcccttagttcctaagggattttgccgtttccggcagtcttgtcctttttcttggaacgcttggaaagatacttcgggcagtcaaccacaaccgcccggaagctctgtttacattcgtgctggcatttccggcacagttcgttgtaagtgatacggctgcggtcatttaagaagaaagaccattccaaccgccgcttgttactcattcttgccataaccggctcctttctccgtttctatctgatgtacgcagataggctgttttgatgtagcgtctcggtatcatttttaagtttttttccctctgtatgcccctttggaaagtgcggcagtattgcaagtcagggaatgatacctcacgcttatttgtcgcttcccggtacggtttcggagccttttgccatccattcaaagaaagcaattttgctgaccttaataagtctgcccctgcggaacgctggaaagccgggtgtgtgtaccagctcataggcgctcgctcttgaaattcccataatccgctgaatgtccgccacatccagaaccagcggtaaatcctcgtagctgttcaatctctttttatcgttcattctgttcctcccataaatcaaataggttaaaatgcttcctgttgccgttctccccaaaagccgttttcctgccccattcctgcggtgtttccctgcattggtgcgccgaatgcgtcacttctcctgccggtcatatcccttttggacggtcattcacttgtcaaggtactgtacggtacgaaattaccaaccgcaatcatcatagcgtactatccttgacaaaacaatgattctgcgataccatgagtgtaacggatataactgaattatataattaccataaacaaaggcaggggatagggatggagaatcagtttatacggcatgagccatgttttgagaggattttgtttgtcctgacgctggacaggaagaaaatgaaagagcggattttgattggggaagaacagcagatccgcttccgtctgaacgggagccaaaacgcagaggtgctttgtgatatgacacgcccactgggaacttttttgataaactttgagcgtgacacggacagagactggaacttatacgggctttctccgctgcggcaagctctccactccaaccgatggaaacagccggagctggagcaggcggcaagcgaatttctttgggagaaatatcttagcaacgaccctctgaaaatgtatgtggcgttccgtatctggaacagctatctgcttgccagagaaccccgtgaccgtaacgctgcctgtgaccgcttcatggataaaatgagcagactgaccggggtattccaaaacgaaaccatgagctttgacagggagacaggaaaaccgaaacaatttcaagctggcagcctttatttcaaaggcgcaccgtcagaagatacccggcttgacctctggttcccggacaaccggcgcacagaagaatgtgtgtctgcctatgcgtccctctacccgttgattacctattatctgaacaggctgaatgactgggggctttgcttccggcggtgcaaggtctgtggaaaatattttctggcaaagagccagcggtatgagctgtgcagcgacaagtgccgaaaagcacaggcgcttcaaaacaagcgggaatttgacgagaggtcaagagaaaataactatgacctgctttataaaaatgaatgccagaactggcgcaacaaaataaaccgggtaaaaaataccgcaggctttccggctgaccgtctggaaaaaatacaggcttccttttccgactttaagaaagaagccttacagagaaaaaaggctgtaaaaacaggaacggccagcccgaaagaatttacggactggctgtatcagcagagtaatgtaattgttgagctgaccgagatatgaaaaactttctatcgtcaatttcgcattattgcaataacagattgcttcttccatgaatggtaatattatcatcaaacttttggaagaactacaaatgtccgaggtgcctttgatttcgacaaaaaaacaggctgaattgttacaacgctcggacatttcaaaaattttttgagaaaaggcgaaaaagcggggcagcacacgccgccccgctgatcccatacggttattccatcgtccgcatttgttcaatcagagattgttttttctgtctgcggattgtccatacagacaagatcagttccattccgaataataccagaatgaacaatcccatttccaaaaccggaaatttgtaaggcactacatttccggcaaaagcacctacactaaatttgctacaagcaaagatggatgccggaagcccaacgatcagcgtcgccaatgttgcaaagaacgcatagcacagcccctcacagatgttcatttcgcatagctgcttttgggtcagaccgatagagcgcaaaatactgttttcctgctttcgggctatctggttagagagggtcgtgttaatcaggttgataacgccaaagaggaataccagccatgaaagcacctccatactgccaaatacaaaagaatttatatttttttcatactcaattatagtgtcaatattttctaacgcaatatcagtatgagtggctacaatatttttcaattcagactctacattgtccgcttttttcggatcacttgcaatgttccatgaatagtcaaacgaagctatttctggatgtaattcatggaataatgcttccgttgcaaattcaagtggagagtcaactgggactgttccatgtccatcagttggtatgctatcgttgtcaaacacccctgatatagtaacaggaatagttgatttcccagaggtaacttcaaccgtttctcccactcttatattatcacgattacttgtatgcgaatcaattatgatgctgtgtgcatccgctggcatagttccctctatcaatgcagcttcaaccgcagaataattttgttcagttagtatatcacaccaaccagcctcatcaattccgttggcacgataatttatatgaaggctttgcctttttgtaatcacatcggttacaccatcaatggccaaaatttcctgcttcaatttctcattcaatggatttcccgctgccatagcttcttctactgccaactcggaatgtaaataaattttatagtcaccatacggataaatctgccttgcaagtgcctctggggagcgcagcaaaaccatggaggataccacaagcaggataattccgcccaaactcaaagacgctataatagagattgtctttttgcggtcacgcttaaaattcgcaattcccattgaaacaggattgagcttgatattctttttccggctgcggatgtccttttgcaccggggtaaaacggacggcttcaatgggggaaatccctgccgcgattttcaccggcttacggatggaaatagacaccatgatccaactgcttatgagtgtcagggaaaccataacgacataggaaacagcgttaaatcccttggaaaacagaagaaaaccgcagcatacgcccagcactgtaccaaccaaaattccgatactgccgagtttgcgtccctcccgctttacaatccgcttgatttgctttggcgttgcaccaatcgtccgaagctgtccgtagctcctgattttgtcattgatggagatacggaagatactctgaatcacaatatagccgccgatcagaacaatggcaatcacgccagccatcagtgcaaaatcaaaggatttagaagcataggcaaaatacttgttgttcatgctgggattaggaagctgatattcctctgcaatctccctgcaataagaggttatcagttcctcgcccaactggtcgctgtttttgaaatggacataggcgcgatacccagccggatcaaaccctttccattctgtcagggcagctttggaaagaatgatagcgcaggtattcgcttctttttcatttacgctgtccataatgccggtaacgacataatcaccatgaaaactctcggtatctaaggtcacactgtccccgatcttggcattgtttccataggtggagagaaagtattcgcttacgacaacttcatttgctttttggggcagattcccctccaatagcttcatttggtcgcgcccaatctccatcatttctgcgtcattatatacataagaggcatgatagccctgttccgaaagttcctcaccgagcatatagtagccgcctacgcgctcaaactccggcagtcctttcagggtttcaatgtcgttttcctctacgcccagccagaccgcctcataagtatcgacaacctgattgcgctgcatttgtgtcagggaagtagctacaattcccgtaaagcagatcagaaatgccgccagcgcaacggcgatcactaccatcagattccggcgcttctcgctttgcaaacttttctttgccagcttctttgtaatggcgctggtatcattttcaaaaggccatgtcatagcctgccacctccttattccacaatcttgccatcctcaatgcggacaatccgatctgcaaggcgggcaatgtcgttgttgtgggtaatcatcacaacagtttgccggaactccgcactggtacgcttgataagccccagcacctcggcgctggtcttgctgtcaaggttgccagtcggctcgtcggccagcacaatagccggtttggtaatcagggcgcgggcaatcgccacacgctgctgctgtccgccggaaagattgttcggcatatttttcagtttatcttccagtcccagcaggtgaacgatctcgtccaaaaacttctgatccaccgtgtccccgtccagctccaccggcaggacaatgttctcatacacattcagaatgggaacaaggttatagttctggaagataaaaccgatgttgcggcggcggaagatggtaagctgttcgtcgttcattttcgacagctctttgtcccggacaatcacattgccggaagtaggggtgtccagcccgcccatcatgtgaagcagggtagacttgccgctgccggaggttcccacaacggccacaaactcgccgtcatttacggagaagttcacgccgtcaagggcgcgggtgatgttcggctctgtgccgtaatactttttcaggtcgatagtctgtaaaatgctcataaaattcaatcctttctttgtttgttgtaaatgtggaacgctgctgcgccggtggccgccaactgcaccagaatcagcacagcgaacagaccgaagctctcatagtagaacaattcatcccaaaataggagaacatcacagagagcagtcaaggcaaccgtccagcggatgtgccgggccagccattgccggaacaccagcacaagggcaacgggcgggacgatcagcagcgccagattcaaaatcaaggtcggggtcagttccattgcgtcgcctcctcacttttgttgataagggtattgtaaaacccaaatgtccgcgaaatgttacagcggccaaaaattttcattgaaaatcggggtgaaatgttacaacactcggacatttcaaaaattcttatgacaattcccgtatttgatctaccagagattgtttttttatctgccgaattgccaaatacgagaaaagcatttggacggcaagcatcagtataaaataactgaacatttcaactgtcggaaaatgatagcttacttttccaaaaatactcattgcactaaagacggtgcagagaagatacccgataagagttccgcatgatatggaaagaagaagcacccctaatgtatagaacaagccctctatcaataacatttttgaaagctgtttactgctcaaaccaaccgcttgcaaaacacccagttctcgcttccgggtcaagatgtttgttatcagtgtgtttagcagattgataatgccaaaaaccccgataaacataacaaaaatgtagactggcatacgatagttcaatagtttttcgttgtatgcctctacccaatcattcaaggtactaacatagaggctggaagtcggtggaattatcttttggatttcatcttttgcggctgcccatttactgtcatctgtatctacaataaattgataattgaggttttcaataggaacgatctttgacagcatttctaaaggaataaatagcgtatcatatccgccatacgggatattagcgtccacaattcccattacttttacttccaatgtttgtccgccaacttcaatcagaagttcgtccccaatcgctgcatcccacccaaaagtttctttccactgtgggccattttcaataataatgccattgtttttaagtagttcctgcaaatctgctgtaccatcaatcaaatattgctcaatcaatttttgagagcttcgtgtatatgcgtctgaaacaatcggttcaatatctcccgttggcatacgaacattcaaaacggtgccttggtattcttttatttcttccacaccatctatgtccaaaatggattctctaaaatcttctgtaagcagattcgatttttggagttctgaatattgttcgctgttatgtgcctgtggcccgtaatcgcctaattcaaggcgaatttctccgtaaggaaaactcctacgcgccatcgctaaaggatcaatggaattaaaatatgcagagcttgccatcagcaaaattccacatacccctaacgacagaatcgttaaggcggttttctttctgttccttgcaaaattaagaaaagctaagttttttgcggatagagaacgatgtaacacttttgtactgttggacattacatcattattgctcgccatataacggactgcttcaataggcgtaacatgagcagcaatcttggctggcttaattacagcaatcataacgcataaatacacaaacagagctgtgacagcggcaattacaaataccattaaagtgttccagccttgcgggacaaggacatatcccgctattgcaccggctaatattccaatcggaataccaattttggaaagatgaaatccctctctaaaaacgattcttttcatctgttttccagttgcccctattgtccgcagttttccatattcttttgtttttctggctatggacacatagaacagactgtaaataacaagggtacacgccaaagcgataataagactgataaatgctattacagtgatatattgactgcttctctgttcaatgagagaaaaataatatgttgaaaactgcatttgctccggctgtattttcaattctctgcacaatgttgataattcagcttgtatagcagccttagaccaaccatcagattcattcaaacggatataagcggagtatgccggttcgctgagcttgttttcaatataggactgcgacacgaatacggaataatttgaattttcgacaggcaaaataccacataaggtataatctttttctccatctcccagatttaacgatataatatcgcccacggatttggacaatccagctctatcaagaaacgcctttgtgatagcaatttcatttgtagatttgggcaattccccctccaaatcaggatattttgctaatttcattagtgtttcatccattgaacggacggttaatttgtagtccccataagatactaaacccaataaatgacttacacccacttgaaccctactgtcatttactaattttgtaatggtatcattatcgacttcattgataattgcttgataacgcccagctgcatcatttaatgattttcgctgcgaagcaaaaaaatacaaggtcgttgtcattatcaagcaggtagctaaggcaatcgtaatgataatgaggatgtttctacttttatctgcttttaagtttcgttttgccaacttttttgtaatggcgcttgtatcgttctcaaaaggccatgtcatagttgtatcacctccatatttgataaggccattgtaaaacccaaatgtccgcgaaatgttacagcggctaaaaaatttcattgaaaaccggggtgaaatgttacaacgctcggacatttcaaaaaaatttacggcgggcagccgggaatggccgtccgccgcgatttattttgtaggcagcataatggaaaattctgaacccttgcccggctccgaaaccactttgatatagccaccctgccgcgttacgatctcgcgggccagatacaggccaatgcccacgccctgctgttcgtgtacttcttcctcacgatagaagcgccggaagatggcggcctgattgctttcggaaatgcccttgccggtgtcggtcactttgatctccacatacatttcccacagcaccaccgacacagcgattttcccgcctgccggggtgtacttcaccgcattgtccagcaggttaaagagggcttcggatgtccacttgctgtcatgagaaaaggccaaatcctccgggcagtccacggacacggcgatttcctttttctccgctgcatacacgatcccactcatggcctgcgccacggtatcaaagaggcggcccggcttcttatccaactggatcacgcccgtttccagccgtgaggttttcacaagggcctgaaagagaaagtccagcttatccgtctggctgcggattccccggataaagtcggtgcgctccgcctcggtcatgggcttttccagcagggtgtccgtcgccattttcagattgctcaccggcgttttcacctgatgggaaatatctgatacaagggtctgtaactcctgccgttcctcgtccacccggcggcggttctcctgcatgatctggtaaagccttgccagccggtgtccgattctggcaagctgggtttcgctgtcctccgggcgctggggcgcttcattcccggcgatcatgtggtctaaagtctggcacaggtcagcggtaaactgcgacagccgcgttccaaacgcctgcgtcagtacaaaaatccccacaagggcgcacagcagcagcaccccgcccgtcagcagcaccgccgtctgttttgtcacaaaaaacagggctatggtgatcccggacatggagagggcaagccctattgccacccggccaaacagccgctttaccgagaggttttgaaacttcattttgcctcgcctcccgtccattgatagcccatgccgtaaacggtcttgatgtagggtgcgccgccgtcggcttcaatcttgctgcgaatccggctgatggaggttgtcagggtgtgttcgtccacaaacctttcgtctatatcccacagcttttccaaaagctgcccacgggtcagcacttgccggggatttttacggaacaggttcagcattttgtactccatcggggatagggtcaggggcttgccatttaggaaagccgtctgctccgagaagtccagaaacagccgcccgtcgtcgtaaatgtccttggccggtttgtggtgttccagcatggcaaacatggctttgattttccgctgcaaggccccgatcacaaagggctttgtgatgtagtccaccgcgcccacctcatagccccgtatctggtcgctctcctgatcgttggcggttaggaaaatcacgatggtgtccgggtgttggggctttatcagcttgcacagctcaaaaccatttccatccggcaggttgatgtccagcagcactaaatcaaattcccgctgacggatagcttcggctgcggttctggcatttagggcagaagtcacgccgtagccgtctgcggtcaggttataggccaacatcttattcaaaaaactgtcgtcctcgacaattaaaatctgcttcatatcctcacttcctttgctttttgcagatagtataacaggcaaatgtccgagaattgttacaaggacaaatatatttatcattttacagcttttttatgtgtactgcaattttataaaagaaaggacagcagtatcatcaaattgctgtccttgcggtttattatagctggtagtgtataagcgtgggttcatcatatttggtgtggtatctttaactatgggaaactcccgtttcccagcgggagaccgcctggcgcgagatgttgagttcgtttgcgagcttttcctgcgacatgccggcgcgtttgcggcaagcggcgattttggttcctatggtcatacggaagacctccttttgctgggctcattttatacgaaaaccgtgggaaaagccaccatgtcaacttggaatttccgcaattttgagttgcggcgggcgattttcggggaattttgcagactcttttggggagaggcgttattttgcttcgtattccgcgtacatatcgcggacgtagcgggagacgttttcgtcgtaatcgggataggtgtagccgtattttgcagcgaaatttttagcggcatctcgaaagagttcgtggcaggtgaaaagcgaccgccatgtgttttccacagaatccgtgcgatacgtggaaagaagcgcttgccactgctctgcggggagatattgatcgatgaatttatagtttttgccgacgctgaacgtgaagccgtatgcgctgccgacctgccacgagagcatgcgaagaagttcattgcgcatcatcgcaagcaagtcaatggcgaataacaattcgcggcgacagaggcccttgacaacatagggcgtgatgttccagaactcgttgcagcagtcgtcaaagctgcgggcgctaggcttttgaatgtgatattctttgtctgtaggggtgggcttttcttcgacgcgaccgtctttatcgagcaaaatctcgcgcaggccgtcgccgtttaaatagtcttcaagcgcggtgaggggcaaaatcgtgaggtcgatcttgttgtaatccgtgaagaacatcaagaagctgtacccctcctcgacggcggggaaaagttccatgtcctcgggcttttgcatgatgaggcgctcgccgaagacatttacccatgtgtcgtctttggtgtagagcgcggggtcatcgacaaaataggtgacatcgaaatcctgaaaacggtctttcgggatgttttgatttgtgcgcgagccttccatgccgacgacgcggatatgcacgtcgttttcggcacgggagaggatgagattcatcatttcttcgggggttctttgggtcatgtctggctcctttttatcggtctgcatcaaaaacgatccggaccgttttgttgaagtctgtatgtttttatcagttgtccgtgatcacaaatgatgaagatcaccgatcttcatcatttggaaagtgatcccaaaagttttcaaattctgtgtttgtgatggtgccgctgctgactaaaatttcgtactgctcgccctgccagtcgtaacgtacctcggacggggtgtagccgttgcgcaggtagaatgcgcggcgcaggtggcgctggggctcgttttcggcggtagggatgtcgagctccaagtcggcgatgaagcggtttttcgggtacagcgtatgcatgagctttagcgcttcgctgccgtagccgtgctcgcgatactgctcatcaatggcgaaatacagaatgtgcgtgatgccgccgtaggtgagcaggcttgcaaagccgcagaagttttcgtctttgtcgtagaagccgacaaaatcgtggccgtcgtgccgcatgagaccgcagatgggcgtgcgctcgtttgcggggaacgcgcggacgtagaggctttcggtgcggtgaaaatctttagagtgctccgtgatcttttccatgtggagtgcggacatatcaaggttcctttcggtgtttttcggcagcaagctccatgagctcgcgctcggtttcgatatcggcgagggcgacgggtatgcaatcgaggacagtcagaatacgggacttgatgaacatggcagcgcctcccctttttctttgattgtagcggaaaaagcacaaaaatgtcaagcaaaaagcgcgtattcttttgcagtttcttcctttttagggtgaaactgtgatataccgcgtatgtatgcggcatgatatttctattttgggggaaatgaatatagccgtcttcaaccgataggataatggaggcacacttcacaagaaagtgtgcctccaaattcgtttacaggattttcttaaccccggggatcttcttcagaatccacgttaggatgaacgagacaaggaagatgccgagggtcaggccgatcaaaataaacggactgcctgcgccgtaggggtggatcttcgtgtgctttaagatgccgcgcacgaaaatcatatggataagatagataccaaacgagcatttatcaatctccaaaacgaacttgccgaaaacgccgggagatttttcttttcgcggtgcgccggttttgcctgccgcgcagccaaacagcgtgaacacgccgatggactggagaatgacaaaaatggaagaatagccgtagaacacgcctgcggcctttatggtgccgttttctttcagcacggtgaacaggacgaccgccgctgtgccgatgaggagaaacagcaggccaagcccgcgattcacgcgccacacgccctgccgcaatgcgtagccgcagaagaggtagaacgggtaaatggcggaaacgcagatataaaacccgacggagatgccgaacgtttttaaaacgggcacaagcgacaggaagatgacgtagacaatcatgaggtagcgcagctcccctgccgtgctgttcgacgcgattttgtggtagaacggcaaaagaagatagatgccgatcatgaggtagagataccagacgtgcgaccacgaggtgccggagaaaatctcataaaagcccgaaagcagcgtttcggcattgacgggctcgtgattgacgaggatctccaatgcgcggaacagaagacagaacacgacgagcgcgatgagcatgcgcggaatgtactttgtaaggcattttttcaccgtgacggggcgctccgggtttaaaagcagcgcacccgaaaccattaaaaagcacggcaccgcccacatcatgttgttgacgacgatgttggagaggagggcttgcgtggcagatgcttcctccgggaaaagggacacggcacagaacaccgtgtgcagaagcacgatggcaaggcacgccgcagcgcgcagataagagaacgaatggacgcgaaaggtgtttgcggaagtccctgcttccgctctcatgtggcggctcatcagttgaacagcgcgcccgttttcattttattgtacatggggtaaatttcctttccgatttaggatctgatgcaatttatccgtgcaaatttattgcaaaaagttatcttctgcggctccaggtgtcggggctgaggaggagcaggagagggaaaatctcgagtctgccgaggagcatatcgagcgaaaggataatcttcgagagatcgctgtaaatgctgaaattttgtgtggcgccgacaagctcaaaaccggggccgatgttgttgaagcaggacgcgacggcggagaaattggtaccgatggaaaagccgtccaccgagatgatggcgaagctgagcacgaggatgacgcagtaaatggcaagataggcgttgacgttgtcgcagacctcttcgctgacggcgcggccgtccatataaacgggctgcacgcggcgcgggtggagcgccttgcggatggtgcggcgaatgctcttcatcaggagcaaaacacgggagaccttgagaccgccgcccgtgctgcctgcgctggcaccgatgaacatgagtgaaagcaggattgctttggaaaacgccggccactgctcgaaatcgaccgtgccgtagcccgttgtggtcatgatgctgacgacctgaaacgccgcgtggtgcacggactcgtagaccgtattgtacatgcggctgatattgatggcgatgagaacgatggagcctgcggcgatgccgaaatacaggcgaagctcctcgtttttgaacaccgctttgaacttgcggagcaagagcatgtaataaaggctgaagttcacgccgaagaggaacatgaacacggtgacgacggtttgcaggaagcagctgtacccgcccatgctgctgtttttaatggcaaagccgccggtgccggccgtgccgaacgcgatgcagaagctgtcgaacacgggcataccgccgagcaaaagacacccaatgcacagcgcggtaagcaaaatgtagattccgtataaaatcatagcggtttggcgcaggtgcggcgttaatttatcgacgctcggtccggggctttccgcacgcatgaggtagatgccggtgccgccgtttttgcgcgcgccgggcacgactgccaagaggaacacgagcacgcccataccgccgagccaatggctgaagctgcgccagaaaaggttgcagcgcgagagcgcttcgacatccgtcaggatagacgcgccggtcgttgtaaagccggagaccatctcaaaaaacgcatcgacgtagctcgggatctggccgcttaaaaagaacggcagtgcgccgaacgcggacatgaaaatccacgaaagacccgttgcggcaaagccctcctgcgcggagaacatgcggttgccgccgcggctgaacagcaaaagcgcgctgccgacaagcagaatgagacacagcgactcgatgtaggcgagtatatttctcggctcgcgatcgatgacggcgatgagcagcgggaaaagctgaaaaatgcccgtgatgagcaaaatcaagccgacggtgcggctgatacttttaacattcattgtgcagccgctcctttacacaaaaatgtcgttgaactgcaaaaccggctgctcacgcgtggtaacgacgatgacggtatcgccaagctgatagtacgattcgccgtccggaatgaccgtgttgccgtggtgtgtgatgcaggagatcagaatatttttctttaagcgcaggcgcaggtttttcagcggctcgccgatatacttcgactgcttattgacgatgaactccagcgcttcggcacggccgtctgcaatgcggtgcagcgtgacggcggcacccgtttggtgctgcatggcgcgcacatactgcacgatattcgcgctgcatagctccttcgggctaacgacgctgccgatggggagcgtttccaccatgccggtcgtcatgatgcggttgacctttgtgacaatgtgcggcacgccctttgcgttgccgaccatggaggtgatgatgttctgctcatcgatgccggtgagcgtgacaagagcgtccgtttcgttgagaccctccgcctccagaatttcctgattggcgccgtctgcgcagatgatcgccgcctccggcagcatctgtgcgagctgttcactgcgctgggggttgttttcgatgatcttgacatggacgtccgcgccgatgagcatttgcgcgaggtaatagctgacgcggccgccgccgatgagcatggcgtggcggatctttttctgcgtgatgccgaggcgcttcatgaggtaggaaagcaccgtaaccggcgcggtgacgtagatgtggtcgccgcggcgcagcatggtatcgccggacggaatgagtgcgtggccgtcacggatgacggcgcagacgagcaccttgcagcccagcacatgcggcaggtgatttaaaatgacgttttcgagcgggctgcgctccaaaacgcgcagctcgacaatctctacacggccttttgcgaatgtttcgcgctttaagaagcccggtaattgcagaagacggaaaatctcctttgccgcctcgcgctccgggttgatgatgagcgaaaggccgaactcgccgcgcatcatgtagagctgttctctgtattcagggctgcgcacacgcgcgatggtgtgcagcgtggggttcatttttcttgctgtaagacagcacagcaagttgatttcatcggcgcttgtggcggcgatgagcacttctgcctgctgtaccttcgcttcgttcagcgtggccatggtggcgcagttgcccaccacggtcatgacgtcgaactgctgcatatcccgttccaaaaccgcccgattggaatcgatggtcacaaggtcgtgaccctcctgtgagagcaaacgcgtaagcgcaagacccacttttccgtcaccggcaataatgatcctcatttcttttttcctttctcgaaccgctttcagtatatcccgaaccgaaaacttcctaaacacgtaatactccacccgggacgacacgtttcccctttgtatcgccatgggcatacatgggtagtatacacccaaagcggtatattgtacagtggcattttgtccgtttttgcggggcggctttcggcgagtttgtagaaagtctgcgggaagatgaaatccacgtaaaagcgcagccggtgtgttaaatacacggctgcgctttttactatcggtaatattttttgtccgggcgcgtgagggggtgctcgtaacggtaaaaaagatgcggggcttcgccgcactgcacgacgcgagatgtgccgtcgcgcgtaaagccggcggcttcaaagaattcgcgggcgcggcggtttccggcgggcagccagaccttgcagattttaaagccgctgatgtagaggatggcgagggcgtcctctacaaaagcgcgaccaataccgctgtgctgcgctttcggaaggacacacagcgagaaaatttccgcgcagtagggggtgtcggcatcacggcaggcgtaacggcagcaaaagccgacggcttcgccgttttgctctgcggccatgatgtactcgaacccgatctttttatcttcgagcagtttattcgggtcaaaaagcgccggaatatcttcggtcagcgttgtgcgcgcgatgtgtttgaaagcgggcaggtcttcccaatcggcgggacggagcgtaaagctttgcataaaatcacctcggcttgactacgaacaaggccgacgggttttacggcttctcccccataaatctttgcggcagcgcaccgaaatttacggtttgcacggcggcgatgatctcctctttccgtgataaaaggcttgcgtcatctatgcgcacgtcgcttaaatcgtacgggccgttgcggaagtggccgacgaccgcgccgtggaacacgccgtcgatgagaagatattgcagtgggtcacagtcatacggcaaaccctctgtgagggattttgcaagcgattttaacgccggctcgaacgctttatagagcgggtcattgcggtggagcgcatagacgctgtgaaattcgggcgcagtgtaggttttgagcgtttctgcgtcttcttttaggagatagccgccgtcggactcgaccaaaacgtcttcggacacgagcccggctatcgcgagcttgatctctttttcgggcaatttgtaaaacgatttcgccatggcgggcgtgaaccacacaaagcggtgcgcaaaacggcggaggacgattttgagggcttccgttttggtatagcggtcgaggctaaaatcggaaaaaaattcgccgaagcgataccagccgcgatcccactcgccgtcgtactggtcttcgtagatgagaaatgcctcctgcaagcggtgcagggcgggcgtgatctccttgacgagcagtccgctttcctctttcagctgcccgatggtgtacgggccggacatttcgatgcgctctaacagcatttgctgcgtcatcgtcgcgtttttgagcggcttgcggtacagcgctgcgaaaagctcgaggtcttcgggcaagatccaaccgaggttgccgcccgcaaagcgccctttgatgagttcacggcggaactggcggcttttattatagacgaggtcgtcgaaatccgcgcggaacgaaagcgtgggcggttgcccaaagccgttccagtagacgttctgcccgggctgaagatcgcggtacaatgcgtcgtattcggtttcattcgccggggtgaggagatgctggcgctccatgcgcagggcgcgtattttttcatcgtacattacggttttcctttcgtttccgcgcgccatattcggcactgttccacgcgtgcgccgtgcggcgtatcgccctgctcgggatcgcatgtatagctccataacaactcacagggcagttccggacattctccgcagtggtaaaagcctttttcctgacagcactgcgccacagggcaggctccgtggaacgggtgtccgtttgtctctatacagccgccgcacccgcagggctctttatacgtacaggtcgtgcaatgcagtccgcatcttgaatcgatcatgtgtgttcctcctaaattatgatattcagatcgtaacacacagaatatgacagcggggtgtcatgttttatagcgctttttcatttttttgatcgcagaacgcattttctttaccatttcgggcggggctgtcacctgcacgtcgacgccgaagctcaaaagccaacgcagggcgtcctccggggtagaaaatccccattcggtgtagagcttgccgtcttcccgcgtgatgaacgacgcggggccgtattcttccacaaggcggtattttacggcgggctcgtaaacggccgtgacaatgtaatcatccgtcatgctttcggtgcggctgcggttcggctctttttcaggcgggacttcacgcggggtgaaaaattcatcggtcacgtttaaattccacaggcggcggagcttatagaggcggaaatcctcgcgtgcggggcaaaagccgaaaacgtaccagtccccccagcggaacacgacgcgatagggctcgacaagcttatccgcctcccctttggcgtaataatagtgaaactcgatgcggcgcgtctcttttacggcgcggcggatcgtctcgatcttctccgccaagtcgtttttgtagaacgacgcgagatcgatctccatgtcccgcggtatatcggtatctgcgccgagctttgcggcgagcaggtcggatgcaggggctttggaaacgctgtcgagcgagcgcagccctgtgaggacggcggaaagctcctgccgcgtgagcacggcggcatcgagcgaaaagccttccatgatggaaataccgccgcccgcgccctgtttggtaaggagcgggatgccggctttgcagatgtcttcgatatcacggttgatggtgcggcgcgacacgccgaacttttccgcaagatacggcgcggtaacggtgcctttttgctgaatggtcgtaatgatgccgatgaggcgatcggttttcaaattaaagcccccttttatccacagtatagcacagctatgtggaaaacaaaatgaaaaacttgcaatgcaaacgaaaatgtggtatagtaccttagaaatcaacaggaacacgccgtctgccaccgggtaggcggaagaacgtgcccacagaaaaccgataggtctgcgcttttaaagtgctcagcaggttttctgcgggcacgttttgttttggagggactatgcgcaaatatcttcgttttgtttcccagagcgttttgggcatgctggggctttccgtctacattttggcggacacatttttcattgcaaattacatcggtgcggacgggttggcatctttaaacctcgcgctgccgatctacggtatcatcaacggcacggggctgctcatcggcattggcggcggtgtgcggtacacgctgcggcacacgcgcggcgacgaaaacgcagacagcgtatttacggcaagcttactgatgggcgccgttttgtcgttcatttatgtgctgtgcggcgtgttcggggcggagcatctggcaagattgcttggcgcttccggcacggttttacagccgacaaccgtctatttgaaggtttgctgcctgttttcgccgttttttattttgaataacatcttaacggcgttcacgcgcaacgacgatgcgcccgggcgcgcgatggcggcgatgctgacgggctcttttgcgaatattgtgatggattggtacatggtgtgcgtcttgaacgccggtatgctgggtgcggtgcttgcgaccggcatgtcgccgattttcggcgtagcgatctgcctgacgcgaaagcgcgggtatcacatcgggaagcaccgtatttttgaggaaatttcgaaaatttctgcggcgggtttttccgcgttcatcggagagttttcttcgacagtcgttattttgatatttaactatctgctattatcacttgcggacagcacgggtgttgcggcttacggcatcattgcaaacgtggcgcttgtggcaacggcggtgttgaccggcgcggcgcaaggcgtgcagccgctgatcagcattgcgtttgcggaacaggaccgcagaacgcttacaaagcagacgcggcgcggcgttgtgacggcggttttactgggcgcgctgtttaccgtgggcgctttgctcttcccgcagcaggtgacggcggtattcagcaagggcagcgcggagctgacggcgcttgccgtgccgggcctgatgctgtacttcttaaactatcttgtgagcggcgtgaatctgctgcttatcgcgcggtttgcggcggcggagcgcagccggaacgcggctgttttatctcttttgcgcggcgtgatcttagttgtgccgtgtgcggtggtgcttgcaaatatattcgggctgacgggcttgtggcttgccgtgccgacggcggaggtgctttctctgctctgcgggctttatcttttataccgcgaaaagaaaagcgaaaaaacagctttgcaggcggtgtgaaacgcggtataatcttttaaaagacgacgatttgggacaaaaggagaccgacatgcacattccgaaaagcgacacgcagcacaccgaaattctgacatttgaagaagcgcagaagcaccgcgaagaaagcgccgtttacgaccgcgaaaaatggctttatatcccggatttttactccgagtaccgttacatactgggtaccgccggcaaaaagccgctcattaccatcggcatcaacccctcgacggcggagccggataacctcgacaacacactgaaatccgtagagcgcattgcgctttttaacgggtttgactcgtttatcatgttcaacgtctacgcgcagcgtgcgacgaaccccgaccacatggataaggcgtttaaccgtgcgctgcacgaggaaaacatgaacgcgttccgctgggtgctttcgcgcagcggcggagaacccggcatttgggcggcatggggcacgattgtggaaaagcgcgattatctcaaaacctgccttgcggacatgacggccatcggcgacgcattccgtgcaaagtggtatcaggcaggcaagccctctaaaaagggacacccgcaccacccgctgtatctgcgaaaggactcgaaattggaggactttgacatggcggcatatttgaaggcgctttaaaaacttgaaaatttaattttgactataaaaaacgctcctcacggttcgtagatcaggtggaagccgaaaacggcaagcctaaatgaactttgaaggagctttttttatgaaaacttttatcccgcacgtgtatttttccgcacccgaagacaccgtaggcgaccttgtgaaccagatccgccgcgagagcgagatccccggcacggcagaaccgaagccggaaatgaaggacagcggcaagaaatctattatcccgaagacggtggtctctgcgcccgaaaaggacaccgtgggcgacctcatcgagcaactgcacaaggaacctgaggcgatcccggaagagaagcccgaggaaaaaacagaacagccggaaaagaccgagggcaaaaaatccatcattccgaagacggtcgtttccgctgcgaaaagcgagcttgaccgcgtttatgacctgctgacaagcggcgaagacctgcagatgaacccggacggcacgctgagccccgcctctgccccgaaaaagcgcgcaaagcccacgccgggcagcgagccgaaagcgccggtgaagacgaaaaaggagatcattccgcacacggtagtctccgcgcccgaaaaggacaccgtgggcgaccttatcgagcagctgcacaaggagcctgagccgcttccggaagaacagcccgaggaaaaggcagaaacgccggagaaaaccgacggcaagaaatccatcattccgaagacgatcgtttccgcgcccgtgcagcagtggtacaagacgaacaaggcgctttataacgcggaagtcgccgccatgcgtaaggaattcaacgacccgaacatgcagccgcattttatgtcagacggccgcatgtactggcttgtgaagacccgcccgaacctcggccgcggctttaacaccatgacatacacaatgaagcttgtctacgaccccgaccacccgaaggtgcgctattcttcctccgtgaagccgtatcttgtttcgccgacgctcggcgaattgcagaaaatcgtcaacatgctgccgcacattccgctggatgcggacggcaaaaaactcatcccgcacacgctgacggacaaccgcggcgagcgctatatttgctccagcgacgtggcggacgtacatgcggaggacacctgcaccacaagcgccgtgacctccttccgctttgcctaccgctggctgatggtgtttgagcttgccatccgcaagccggaagcatggaaggattttcaggcgcatgggaagatttaacggaggctttttgatgaaactcttttcgaccccgccggtgctttccggcaagaaaaacaagaagcgcaaaaagcttttgaaggcgcagcgcaaagcgttaaagcgcgccgaccacccgtttgaatccgacaaagctgccgactgccgcggcgtagtgctttcaaaccgcgcgtatctctctgttctgagcgaggtgtattcccgcgacccgttggagacgggcggcattttcttcggcaacgtgaaaaatggcgtgtggtatgtggcggaagcgagtgaccccggcgtttacacgctgcacacgcgcgcccaccacgagatggacaataactaccacaaccacatttacccggtgctttcgcgcttatatcagcacgggctgtgtcttttggggctttggcaccgccaccccggctcgctcgacacgttttcaagcgacgacgaccgcacaaatcacagctttgccgaggtcatcggaaacggtgcggtttcgatgctcgtcaatctcgaccccactgcgcgcctgacatgctattacctcagtaaaaacggcgaatatcgcaccgtgccggtcatggtcggcgacaaatactttgcgggtaccggctttttggagctgacaacatccgaagcgcttttaaagaacaaagaccgcctgcaagctgaaatttttgaccccgaggaggcttaactgtggaaaaaatcatcatcacacgccgtgagcttatcagacaaattccggctgatctatccgaacacgacagaactgtgtcacttttaaacgcactttccgagcgtctgccgaaaaacgcggaaaaagaggacgttgacttacagtccggcgactttgacgaggcgtttcgtttgctaaacgcgtttgacccgcgcacgtacggcaccgtgcagctcggcgagagcctgcgcgaggagcagacggatacggcaaaggagcacgtgggcgtgctggggctttccgacacggctttgcccggcaatgattatgtaggtgaagtgaccggcgcgggcagcgcagacaccggctactactaccttctggctaccgatgagacctatgccgatacgttcaaaaatcccgaccacaccacccgcggtttgatcgtatcgggtactgcatacacggcacttttgcgtgaaaacgtggtgctgacgggctacgattattttggcacctatacggacggcggctggcttttcaaccgttgcgacgaagcgaaaagcacgctgacggtggacagctttacgctcatccacgaccttttcagtcgtaacacgggtctgtttgaatctgccgagatgctgaaaaagttcgccgtcatcatcggctgcggctctgtgggtgcacgcgccgctttggaactggcccgcgccggtgtgggcagatttctgctcatcgacgacgacattttaaagccgcacaacatctgccgccacacgcacggtatgcgcgacctcggccgctttaaggctgaccttctgcgcgaggatattctgaacattgaccccgcagccgaagtgacggctttccgcggcaagctggaaaacgtgccgctttctctctttgaaaatctcggcaagaacggcattgtctttgcgacggcggatgacagaagcgcgaatgcgcttgcaaatgcgctctccaatacactcggcgtaccgtttattgccgtaggctgctgggcacgcgcccacgcgggcgaggtgttctaccacatcccaaaccgcggcatgaaaacctacggcgagaccttctccgcgcttttaaaggacgccccggcgcgcgacacgcacggcgattattttggcgaagcagaggcccgtgaacgcctccattttgagccaggcacctctacggacatcggctttgtgacactggtgggcgtgaaatttgcgcttgaccttttgaaccttgaaagcgaagcctataccccgcgcgttttgaacgactacacgccgtacacactcatctgcaacacaaaccgcccggaaatcggcggtgaaaacgcgaagatcttcccgtacccgctgtacatcagccgctccattcgcccggcgggtgaagcatgacggacacggacgcgctcacggcttacttgcggcagcttgagcgcataaaggacgactgggacgaccgcaaatacgcggaaatcgaaaaagactgtcttttgccgctttggcagctctgccgccgtatgcaggagaccgagcaggacatttacgcgttcatcttcggcacagagcacgaacttgcacacatagacaccgacatatattcttgaaagaaggcatcgttatggcaaacggaagcgttgtggtacacgacatggattcccttgaaaaattcggcatggagcttgcggcgcgcagcgcggaactggaatcgctttataatgcgcttacggtgagctgcgcggcacaggaaacaaactggcatgacccgcagtacgacctcttgcacgagcgcgtagagctgtacgccggtgaagcccgcgcacagctgcttgcgctgaacgacgcggtgcagtatatttccgtgctggccgcaaagctgcgcgctttgtgatatgagcgacgtaaacgtattgctctgcgcggtggacagcgccatgaatacgcttgcggcctttgaccgcgaccgcgccgatgtgaccgcccgcgtttcgttcgcgctgagctccgtgctggcacgcgtggcgctggaaaccgagcagtgccgccgtgcgcttgcagacgcagaagctacttcctatacggacgaagaaaccggcaatacggcagaaaacccggaggccgcccgcctgcgcgccagactggacgccttggaggccctgaacgagtgctgcattttagccggcggtgcgctttccgccgcatgggcacaggaaagccgtcaatccgaaacgcacgtaagcgatgctctgcaccgctgcggcgtttatctgaaaaagctgaaccgcattgcactttcgcccgaccccggcagcataacggtttcaaaccacggtgacgcgcccgttttcgtctgtattgtggacagtgcgctgtaccccgagaccgccgagcacatccgcgtggcgcaggacatcggctttccggatatactgacgctggaccgcggcggcgcggcagagcgcagaaaggcctcccttgcgccgatcaaggcgagccgcatctgggaccgcgacgaatacccctgcgcgtgctttaaagagggcggcgcaggtgcgcacgtgatgtacgttgcgggcacggataaccgcggcgcaggctcttacatgggctggcagatgcgcggtctgcccgacggcacaaaagtgcgcgtgcgcgtgatataaggagaaaactatgaccccgaacactaagattttcacagaccttttaagagaaaaccgcgcatttcttaccgtttcggcggcggaatacggcgcgggccataacgccgcagaagcgtttcgcattctgccggattccatgctcggcattctcgttcgccactgcgaaacggtctcctgtgcgggcggcctgctgcatctttacggcggggggcagcttttcgcccgcaacacaaaagacaacaagccgttttctgacttgcttttcctcggtgaccttggagacggcggccttttcgccgtctcccgcatcgatactgcgattgcaaagcgcggcgagatgctgtttctctccccgggcgcactgaactttgagcctatggggattgacacggcggagttcatccgctgggcgctcgaaagccgcgaagagacgctgaaaggcgtttggctgacaggagagattttatcgccccgcgcgctcaaaaagcacatcaccgcaaagcttgaccttttagaccgccttgacatgctgaaaacggagggagacgcatgaaattctttccaaaatccgcagacggctttctttctgccatgatgatggcggaaaacgcgcttctgcgtgatttttcactgagctgccctgcttcgctttttggtgcagagcccatggaaagcgccaaaaaagccgtgaaaagctgcatgacgctttcatcgtttccgtgtgcgcaaatgctgaaaacaaacacgcgctacgtgcacgactttgcaaagcgaacgctgaccgtgacggtcaacgcgcggtacatgagcaccggcaaagaggtgaacgacctgcggtgcattgcggcggatattgcggaaagcataaagcgcagcctgccggaaaacgccgacttctttcaggtgattgcggcttaccaaagctggctgaaacgcttttttgtctataaaaagaccggtgctacgcgtgaccacgccgctgtggggctcttgcagacgcggcagggcgtgtgccaggcaatcgccgcgctttccatggtgattttgccgcaccttggcattttggcgcggtacgtttgcggcgaaggctactccggcacagtttggggcccgcacgcgtggaacgcggtatgggcaccgaacggcacatggcaccaggtcgatttcacattcggcctgcaccgcaaaacgacgccgaacacgtttacgccgccagatgatcttccctttcgcgagctgcaccgctgggacgaagtagcgcaaagccccgcgctgtttcaaaacgtgcagaccctcgaaaaccgcctgcaagctaagaccgttttgctgttcgcaaacaacccgttcaaagccgagatcggcggcgtcccgatgctgtttgacgaacctgtgctgcaaaacggctgcgtgcgccttttgccgctcctcactctgctcggcggcgggtgcgagctgctcaaagacacgctgcacattgtgctcggcggaaaaacgcaccgcattccgtgcggcacgccgatttcaaacggctttgtgccgataaacgagatcttagcgcaaagcggcttttgcaccgcagaacagcgcggcggggtggttgtggtgaagcttaaaccatgaccgccctattttttcagtaatctttttacgttcatcaaggtcaaagcgagatcttcttcgcttaattgctccagtgcgtccaaaagctcgcggtttacgcgcgggtttagcgccccggcgttaaaaaattcgatcggcgtaatgccgaaatactcgcaaatcgccaaaaattccgtcatagagggcagcgttttgccggaagaaatattgttgatatacccgcggctgtgccccagatcgtaactcattttgtactccgaaacacccttttgcagccgcaactgcgtgatgcgttcacgaataaattctatatccatacggacaactcctttcccgtatagaatagaacaaaaagatttccacacatgcgttttaaaaatgttaaaacagattgacacgcactctttaaaatgttattatagctttgaaaaggttgaatttacataaaacgacattttcaaaactatatttgaggagaaggaacgcatcatgaaaagatttatcgtactgttctcggccgttatcttatgtttaaccttggccgggtgcagcggaagccagtacaaaaaagcaaccgagctttatgagcagggaaactacgcggaagccggagagattttctcaaagctcggcaattatgaggacagcgcagacaaggcaaacgaatgcaagtatcaggaggcctccgccttgctgcaaaacagcgactacgacgacgccaaagcactcttctccgcgcttggtgattacggcgacagcgcggacaaagtgaaattctgcgattataaaaaggcagaaaaattgcttgcagatgatgattatgctgcggcaaaagcaatttttagtgctcttggcagttacgaaaacagcgcagaccaagtaaaagaatgtgattatgaaaaagcggatgcgcttttcaaagataaaaactatgaagatgcactggctatctatgaaactatcgccgattataaggatgcacaggacagaattgacacggctacatctaaaattctctacaaaacatacggagatgtaatcgatcttctaaacgaaggcgcttggttctttaacggtggttccgatcatattgtgacccgtttgctgttcagttatgaaactgcaacaatcacaaccattacattcgacggaaacggtcgtcacgacggctcaaacaacttctatgcttatacattggatgacaaagaaatcaccatcaaaaacaaaggctctgtctatcgcgttataccctactctgtcaaagatggaaaactgaaattgggcgaaggtgattatttcaccccggatgaagttgatgccggtttgcaagggtactggagcttgaaagaaaaaagttcatccactaataaaggtagtgaagatatttattactttaataatggtaaattgacttatgaatatgctgccgaatctttctggagcgcagatgaatatttctattatggcccatatagcggtacatacaaaattacaagcgatggtatatctgctacaacaaataatacagacatcatccgtgatcggatgtttggttttaatatcataaacggcaaagtgaccctgttaatagcgggaaccccttgcaaaacttgttcagggtttaagggagaatacggaaattggtttaactaaaaggagtttttatgctgcgaaaaatcattgcgctgtttttggcacttgccgttttgctttgcgcctttgccggctgtgcttctaagccggaagcggtgtcttccggtgaagcttctgcgatggttaagcccgctgaggttcccgccgaagaacctgccgatatgctcagcggctcgtggacgccgcagggagctgtttaccgaaacactgttatcgacctcagcgataacgaatctctttccagtatgtacagcggcacagcgcttacgttcagcgagggcaacactttcagctactacaacatattcatttatacaggcacctacgagctatacagcgaaaatatttaccatttgcaaaccaaagaagtcacttggctgagcgtggacgaaaacggcgcatccgaaaagccgatgacaaaggcagacaagcccgcatatgtcgtcactgtgctggacgaaaacaccattcggtttgatctttccggggcgtcagccatcgacgacatttcgcttatcttcgtgcgccttgacagcgaaggcgactacatacaggcgaacaagacaccgctgaccagttcgtccgaatcgtctgaaagcaacgcggccccggacacctccgcgcaaaaacccgcttacgtcaccacgggtgaaaagaacgccctaaagcgcgccggtgaatacctagattacacgccgttctcctacaccgggctcattgagcagctggaatatgaaaactatacccatgccgaagcggtctacgccgccgacaactgcggcgccgattggtacgagcaggccgcaaaagctgcgcagaaatacctcgactatatggctttttcgcgcagcggcctgattgagcagctggaatatgaaggatacacgcatgacgaagccgtttacggcgtggataaagtgtattgacgaaaaggaactccccgtgatgatgcagagagttccttttttacaccaatttttccagcagcgcgattttctccgcgctgggtttgtcaacgcgtttttgcacgcgccgacacttgacattttctccccctctggggtataatacgttttatgggacacgctcgcttttaaaacggaacaccgaggtgtagcgcagatggtagcgcgcttggtttgggaccaagatgccgcaggttcgaatcctgtcacctcgaccatgacgagtgttcttatagcatttgaaacgctgtaagaacactcgtcttttttattgatttcatccggcgatggtggatggggcgtagttgacgactacgccctttcttgtgtttacggacacctccggggcgggcagcgggatgaggtcggggatctcgatggcgcctacgcagttgtagtggatgcggagccgttgctcccacaccccgtctaccttctcggcgttgaacacttcgattttctcgatgagttcgttgagcatccggggcgtcagtttgcgggcgcgggtgtatttgcggaccagagagataaacatatccgtggtcatggactggctgttctgcttgtcgatctcggcgcggagcgccttgatcttctccgccaattccttctgctcctcctcataccgcctcgacattctggcgaaacggtcatccgagagtttgccggaaacattatcctcatagatcctctcgaacaggccgtccagctcctcatcgcgggcttgcagggctttcagctctttctccttcagctttcggtcggtggcctctgcctgctgggaatggccgatcacagccttcacaaactcatcctcaaactgactggaaaatttagttagcctccggatctcgcctaacaccacctgctccaggaagtccacacggatataatgggtagaagtacaggtcccacggttgcccttgtagttggagcagttgaaatacttgatgtcggggttgccctgattgaaatgaaagtgtaggttgtgtccgcaatcggcgcagaccagcaggccggaaaacatattgcgttccccttcgtgggtacggcgcttgcggatcttgccgcgcttctgctggacctgctcaaagaccgcccgctcaatgataggttcgtggacgtccttaaagataacccagttctcccggtcattttcaattcgctttttgttcttgtacgacttggagtaggttttgaaattaaggatgtcgccgcaatactcttgcaaagacagtattttggtaacactggagctgttccactttgtcggagcctgctcctttcctttgccgggccgtttaatgccttttttgagccagtaggcgcggggcgtcaggataccgtcttgttcaagacttgctgcaatctgctctgttccataaccatccaaggtcatacgataaatccgacgaaccacctgggcggcctcctcatccacgatccaccgtttgggattgtcagggtccttgatatagccgtagggaggttgccccatcggctcgcccgcattgcccttgatcttattgctgatccggcgcttcttgctgatgtcacgggcgtaccactcattgaacagattgcggatgggcgccagctcgttctcaccctcagcggtgtcgatgttatccgagaccgctaccaagcgaatgtcgtgctccgggaaaaactcctcggtcagccgccccacctcaatgtagttgcggcccagccgggacagatccttcacaaacacggcggcggccttgccggcggcaagctgttccatcatgtcgttgaaaccggggcggtccatcgtgacgccggagatgccgtcatccaggaagtggaccagattggtgtaacctttttccttcgccaccttggtcagcagtttcttttgatttccgatgctgtaactctcgccctccaggttgtcatcgcgggaaagccgctcatagaggaatgcggttacagcacgggatttgcggttgttcgactgtctcattcagtcctccttcctccgggacagccgaatagcaaatataacttgtctatgttcattataccgccatccgctgtccctgtcagccgggtccgggagatttactttgcctcgctctcggacttcatcagccgcagaaggatgctgcccagggtatccgggccatcttgccgaaaaacaggttcaacgacaaacgacctattgccgaagcgataggtcgtcttttcatctaacgatttcttggaagagccgggcttaccggcaatagttttttcttgcataaaatgaccccctttcgcaagaaagatcaatacgaaagaggcagaaaacggatggctgctggcacagctccacgggaatttcaccccggcccatactgatgggtgcggcgcacgatgctttgcgggcgtccaatgcgcgagtctcattatcctgcctgcgcgtcctcgcccacaggctgccacacctgttttacggcccggttttgtcgctctcctgtttggtaggggtcccgtcctgcggacttgcaacaggatcttggcgcaccggccgaccggctccacacagacagatcgtatccgtctgccttatactgcgccggaggcctcccgccgggctttctttgtcaaggagctataaagggacgccgtgtggaaaggggaacacacagcgcccggccctggatcagctcaggtcaaaatccaggatggagataatcagctttgcttccagccgaccgcgcagatcttcgtccacctggggacggggatagccgtcagggccatagctcgtccgtgtagacagcgcggcgatgtagccggagtaatgccggactacccggctcaccgcttcggggtctcctcccacagcggcggcgatcaccgggtaagggatcagcgatgcccgcgtgcgtgcagatttactcatccgcttcacctcccatcagctccttcagcagccgataggctttatgcctgcgggtgttgaccgtccggcgggccatatccatgtacctggcgatctgttcatcggtcatccgcaggaaccagtgcatcataaagatttcccggtcctcctgggacagccccagaagcgcctcggccagccggtcgtcctcgatcaggatcacggcccctccaatggggaaggtcgtgtattcccacgagtagcggtcataaaccgcaagctgggccatttcagcctcggacagttcctccaaagacgcgaaacgcttttggcggcggctgatctgtcgatagccgttgcaagcctcgcatttcagaatcttcttgcagtagctgtcaaaggcgtactgcttgtgctcgtagtggcggtcaggtttcaagttctcacctcccttcgtgccgggaggcagttcttttcttcccctttcgctcactactcgttcacgagtggtccggtttggccggttttcgggagctatctgaaaaaattttttgccgctcatacttggctcctttcgtttcgttcgggttgacaggccggaacgaaacggggcggggagcggcagcctacgcccaggcgctcaaagggacgggttttgtgagatgtgagccacagcatataaaaagcgagccataactcactttcatgagcatggctcgctgctgcgttattggaatatttttcgtagtggcatgggcgtccgccgcataagcggtaaaccccgccttattttgacctcctttgtgttggcgctctcatccatatctccctttattccgaaatatgagttataactcactttacatgagttacatggttatttatatgagcggaagcacaccctacaatgatgtagaggtgatgtgtagtgaacaatccgctggatctatttgcatggaaggtgcggtcagaacggaagcgccagcatctaacgcagaagcagttagctgaacgcctcggtatgaacccccgcacgatcatagatttggagacctgccagagtaatccgaaatttgaaacggtggtccttgtcgccaaagaattgaatatcagcgtggacgccgccatcttcccggaaatggtaaatcagacagtctcgaaaacagtcgtggacttctttgccgggaaaagcgaagcagagatcgaaaaatttatcgcgctctgcaaacaggcggaagccttccagaaagacgagtaacgcggtcgggttcgatgtgcccggccgcgttactatttcacccgtttgctatgcgggcagtttattcttcttttgttttgtaagcatttttcagatgctcgaaggactcctggctgatgacatgctccatccggcaggcgtccttttccgccgttacagggtctactccagcctcgatcagccggtcggtaaagaagcggtgcttttcgtagatctgctccgccacttcccgccccacatcggtcaggtgcaggaaatagtcgctgtccatcgtcaggaagcccccgtcccgcagggtcgccaccgcatggcatacgctgggctttgtgacctccaggtgccgggcgacatccacagagcgcaccatgcctaatttgtttttcaataccaggatggcttctaagtaatcttcaccagaggcatacaatttcatcatgagccaccccggttgcctccaacttgccagttagaggattctctttgtagctccaccatgtggcggaacatcccgccccgttccatcaactgctctggtgtgccttcttccgctacatggccatctgccagcaccaccacatgatcggctcccatcaccgtccgcatccggtgtgcgataaccaaaactgtcttatccttgagcagtgcggagagtgcagtctggaggctggtttcgttctctacatccagagaggcagtcgcctcgtccagtagaacgataggggcatttttcaacagggcgcgggcaatagaaatacgctggcgttcacccccggacagagtagagccgttttctcccaccaccgtctggtatccctccggcagacgctgaacaaactcatcgcactgggcggccctggctgcggccatgacctcctcatctgtagcgtccttgcggcccagacggatatttcccataatggtatcgttgaacagcaccacatcttggaacacaatggcataatccttcaacagtgtttccgggtccaccgtggaaatgtccacaccgcccatggtgatggtccctttctgaatgtcccaaaagcgggcggccagtttcgccgtggtgctcttgccgcctccagaggggccgaccagcgcggtcacttcgccctgcttggcggtaaaagtaacgtcggtcagtacatcctctccgtcctgataccggaagcccacatggtcaaagcaaatatcgtggcctttggcttgatactctgttgtaccttcctgtgcgggttcctgctcaatagctttcatacggcggagttggagcattgcgttgaaaatttcactgagctgcatcatcacgccgctgagtgggtcataaatgcgggaagccgtcactaagaacatgagaaaaaagaacaggtttagttctccctgagtcagcagtagcgtccccatcagtacagtggccgggaaccccaatcgaaggagcatctgcgaggaagtaatcatcaggccactggtcatttcatagcagacggaggtatgtacaatcttctccaactttttgtctaaccctgccagataggaattctcctgattattggccttcaaatcccggatgctctccaaaaactcctgtatcccgtcggcggcatccagttttgattggatctttttcaggtccatatggttttgcaggcgtttgctccccacaaggacaaggatcgccaggacaaagggcgacaaaattgccaacgccattctccaatccatgaaaaacaggcacaaacagacgatcacacaactgatggctgttccgaaaatttgtggaatcgtataggcaaagacccgttccaggtcattgcagtcgctcatcatggtagtggtcaggtcggaaaggtcccgcttgccaaaaaaggacagcggaagggtgcgtaatttttcggctaagccgatccgccgctgggcgctttcagcataagccgcaatataggtacagcggtactgaatgtaatgggtcaggaaaataatcaccaatagcaccagacacattccagcataagcccccagcgaaggggtggccgtttccatccccaagagcggctgaagcagctgcatcaccagcattaaaagcagtcccataggcatcatcagactgagtgaggtaaagaccgaggcaatgattccttttttcaaatcctttgcgccctgctcggtcagggcaaaaagtttacgaagcataatgtccctcctttccgatattccaagcaactgaggtctgataatctctccacatagatgcgtagatcccgttctgtgccatcagcgcactatgggttccccgttctgcgatggttccctgttccaataccaaaatctcatcggcgttttgaatggtgggaagccggtgggcaatcatcaggacagtttttcctcttgtcagacgctcaaatgccatctgaattttgtgctcgttttccgggtcagcgaaagcggtggcctcatccagcagaacgatgggggcatccttgaggattgcccgcgcaagagcgatgcgttgctgctccccgccggagagatagacgcccctggttcccagcaccgtgtccacgccctttggtaatttctctaaaatatcatcgcactgggcagccctgagcgcctcctgcacctgctctctggtcgcattcggccgggaggcgcgaacattttcgaggatgcttgccttcagcaaccggctgtcctgaaatacaaaagcgatgcgctccatcagttcccgcttggggatttgagaaaccgggacgcctccaatgcagaccgccccttcctgcacatcccaaaaccgggggatcagggtggcggcggtggtctttccgctccccgaagcgcctaccaaagccacagttttcccctccgggacttgaaacgataggtgagaaagcgcaggcacatttccacctggataggtaaaggtcacattccgaaactccacatcattctgatccggtatccgggcgagcgcgtcctctactacggaagcctctgccagcagggagtcaatccgccgcactgcttcctgtgccatcatacgatgtgtgccggaaaataaaattttgttgaggataccggcactgccggaggtaaacaggatatagaaaatcaaatccagcagaaactcgctgtactgttccgggccaatcaggaggataccagccgggatcagcacagcaaaggaggcattgatgatgacattgaaagccaccatcggtccttggcaggagagcgcatattccgttacattgtccttgtagtacatgatagcggcgtaaaagctcttaaaggagtaaatcgtttgctggaaaaccttgactactgggatgccgcgaacatactctaccgcttcattgttcatctgttccgaagcgtcctggtattttcgcatataggacatagatttctcgctggtcatcagcatttgtaccataaaccccgcaaccagcagaaggatggacaggccgcctaatctccaatcaaagaacaacagcatggccagcatcgtcacagctgtcacggctgatccggtcatatccgggagctggtgcgccaggaagttttccgtctgcgccgtgttctcattgatgattttccgcagtttgccgctgctgttctgggagaaaaaacccaatgggagcgaagccagatggtgcaggatctgggactgcatatttttggccgtgtggaacgcccctagatgggaaaataaaagagccagcgaatagagaagaaagcctcctacggccagacccagcgcggcccagccataaagggtcatcgcctccacatccaccgtactcaagtccggcagggctgccagcacattccgcaggaccagccaaatacacaaaaagggacacagcataagcacagaactgagtccggataaaatacaggccaccactgtcatccagcggtaacgacccccaaactccaaaagtctggagattcctgtttttttcttctgggtcatctcatcatctccttatccacatcaacacgaaagaatccattcagaagtttgcaccgactaaccaaatgatacagatccagcgcctgggccacccggtcggcctccgggatgccctgcgccagcagcgcctccatcaggtcgcccaggatgggcatattctccggccgggggtctgcgaagtagggctggtagatcttctgcaccgcccggtcgatgaccgttttctcgatggcctccagccccgtcttgctccccatgatgagctcgcagaaggacaggacaaaatcacttttcagcgccagggggttctcctcgtctgaatagttgaggttgatgtccagggggttcacatagtcggtgctggacggggacagccggatgacctgcccgcccagccggcgcaccaggggcgaatactcgtcctccgggtcgcagatgatgacattatcttttgtggtcaggatgatgaaagtgatctcccgcttgcagctcatggacttgccgctgcccggcgtgccgaacaccagcccgttggggcttctggactgtttgcggtccagaaggatcatgttgttactcaaagcgttgaggccgtagtacatggcgtccccgcccatgaacagctcctgggtgacgaagggcacgaacaccgctagggccgaagtagtcaggctccgctcgatcctgatccggttgagccccaggggaaggctgctcatcagtccgtcctcctgctggaagtccagccgggtgaggaggcagttgtaggtctgcgccacgctggccgcctgggacacggcaatctccagcttctgcttggtctccgccatgtgcataaccaggaaggtcagattgaacattcgctcattcctgctttgcaggtcctggaggatggtctttgccgcaccgccgtaggtggcaaggtcgctggggaggatgtccatgtcgtagccgctgcgtaccgcccgcttctgctccgcgatcttcatggcgtccaaatccgtgatcttgcgcttgaccatcttgatggcctcgttctggttgatgccccggatgtgcatagttaccaggatgttgccctcggtctccataaactccgccaaaatgcggtcgtggatctccggggcggtgatctgcaaaaagctcaccgccccgtacatctcgccaatgcggaaggtgcgggtctccccgaagtggaaggaggacggggcgatgaagtccttgaccgaaaggccgctgggcgccagccagtcccaatcgaaggcgaacttcccgccctccggacggcggccgtctgccgggtggaggatgccgtgaagcagctccagccgctcttttccgtccagcacatgggcggcggcgcccatgaccttgaagcggttgagggtgtcggtctcgatacgggcgaaccgcgcccgcgccgccggaaggttctccgcctcgatggtcagggtcacatacttggttttcacatagccgttgctgccccgctcatactggaagcgcagtattccggccgcgtcctcccggacagggtccaggtcatccccctggggacggatgccgaacaggtcctcctccggcccatgctccacataccggctgctgagcgacacctgcaccccaatggtggggtcgtagccgttgtagaaatcgcagaggtgttcaaaaatatcccgctggccctccggcgaagccaggcggtagttgacatcctcgaaggcgatggtcttggagaaggtcccgccctccagccggcacaggccgtccgggaacatattgcggaaggggatgctctcctgcactgtatgggctttcccgtcccccttggcctggcggaccaccgcctcgatctgcttacgctcggcgcgggtcagcttgcgccttgcccctgccggttttgcgggtcttgccgtttttgcctgcaatcgctctcacctcctgttccaattcgtactgccgcaccagggcggagtacaggttgttggtctggtagatccgcgtctttgggcggataaatttgttttcaatgagatgtcccaggaacacctccaggggctgcccgttcttctcgtacatggcgaacaggaagaagggaagcatcaccaggatcatgcacagggccgccgtggtggtgccaagtgcccccttggtcaaaaagaaaagcggcacgccgataattgctgccgctccgaaacagatcacctgccgtttggtcagcccgaacaggaccttgctctgtaccttgctcaggtccttcgggatcgttacataggccaatcaatgcacctcctttttcatgggagcatagtccttgaaatcttttaccgtgtggaaaatccgtttgttgttcacccaccgctgaagatggcgggtgatttttggagcggtagggcgctcatagatcatcacataggggtcataccccaaggcccgcagggtgttcacccggtagaggtcctgctcatgggtgctgccgtagttggtcagcacatagacccgccggttgcggtcgcttcggatggcggtatgcgccacaaagcgtttgaagtgctccgtcaggtcctcctccgggttgtcccaggcgaaatgcaccgccttggtccgcaccctgttcagcagggcgatgttgtccgggttcgtcagccggatgtccagcccctgggtgaagtccaccagcgcccggctggcggcaagctgttccagaagcgcctcatgatccgggcaggccagcaggttggggtccagcagtttgatctcatcctcaccgcgccaaaattcagaaaggtcagcgactttgacgctcctgcgtccctccttgccgctgacgatgcaaaatccgcagttcctcggacagccccggctcaaaaagccgtaggccgttcccaaaaaccgcggatacaaaaagtagtccggccggatgtgctcgatctcataggggaggtcttttccgcccggcccgtagccggtgccgccttggatgaccttctccgcgttgttcaccacgatggtgtccttggagtaggtgtccgtgaacacccggctcttgtaaaccaggtcatagcgtcccttggggctccaccactccacccggtcgccccgcctggtatggtactcggagagcttcatcaggcagaggttgggaaagttgtgggagtccatgtctatcaatcctattttcaatcagccacccccctttagtgcgccccgaacagagactttgcgaggctgccggtcttaaagagggtgaagcacaggagcaccgtgtaccccatgcacccccagatagcgccggaaatgttgtcgccgctcagggagataccctccaccagcaccgcgtagatgcccacgcagatcataatgaggaacgcctggaagcccagggccagcagggagcggagatagttctgccccgtgttgccccattcccggttcaccatcgtggcaaaggggatgggtcctatcgaggtcaccaaatacacctcaatcatccttccgtagatcaccaggaagatgcagatggagaggatctgcgtacacagtcccacgaagatgctctggaaccacagccccagcagggcgccgatgctccagtccgcgagctgggtctccaggtcggcggtcacgccggatatgtcaatgcccgcatccgagatgatgacgccggcgctctggctgaccacgttctgcgccacatcgaacaccgccatgacgatattccaggtgttggtgacgatgagcaccgcgcagaaggtcttgaagatccacttgaagaagatccaggtgtcgaagtcgtggaggttgttcttttctacgatgagctggatgagctcataacacatgacaaaggtgaggacgatgccggcgatggggacgatcacggtctccgagaggctgcggaccatgttgaaaatgccgctgttccatgcggagggcgtcatgcccacctccccggcgatctcgcccaccttggtattcagggtatcaaacatcccggtcaggtttgaaatgataccgtcgatgagcagttcctggaaccactcctgtatcgcgtcaaagatcaacggggatcacctcctttccgggaggccccgtgtgccggggcctcccgtggggtttactggcagacatcaggcggagagcaggccggacagcagggggatcagggtcaggccgataagggcgacaccgccgccggccatgagctgcttgatgccctggcttttactggcagggttgtcctgcccgtaaccttccaggaggttgatgccgccccacacgcacaggccgccgcccagcgcgatcaccagagtctgcaatacgtcgatagcgttagtgaaaaaatccataaatcatatttcctttcttcgttgtagaattgttattgaaggtccgttgctgtcaattcgtacatctcgaaaggctcatccggctttacgatagccggtttgcgtttcatgtaccgttccatatcaaagaggtacttcttgtcggcgtcggcggtgtatttgtagttcggatgcttcgtcaggtcgtacttgtccgagaggaacgggcgcacgccccgcagcatgaagatacacttgcctccgtccattactgccaattcgtcttgtgtcatcaactcctttcccaatttctgataggtaaggccgtgagaaacctggctgccgcggttctccgattgattgaaactgtcgatcgtttctttccccagtagctccgaaatttctttcagggtggatttctccttgcctcccaaaaacaaggtgctgtcgcagttacccacgatggtatccgccgcgtccttgtagatggtctttaactggctttggctctgcaaaataatagaagccgatatttcacggcttcggatggtggcaatcagcttgtcgaagttcgggatttgaccgatgttcgcaaactcgtccagcaagcaccgcacatggaccggcaggcgtcccccgtagaagtcgtccgccttgtcgcacagcaggttgaaaagctgagagtacatgagcgccgccacaaaattgaaggtgctgtccgtatctgacaaaatcacgaacagcgccgatttgcggtcgcccagagtatccagctccagctcgtcctccgccatgaggtcccgcagctcctggatgtcaaagggagagaggcgggcgccgcagctaatcagtatggattttagagttttgcccgccgccatcttgaatttgcggtactgcttcacagcaaagtggtccgggtgctccttttccagcttggcgaacaggatgtccaccgggctttggaactcctcgtcgtcctcccgcgcctcactggcgttgatgaggtccagcagggtgataaagttgcgctcctccggctccgcctcgtaccagatgtacccgatgagggcggaatagtacagccgctcggccttcacccagaaatcctcactggacttttcgccctcccccttggtgttgaggatcagggcgttcaccagcttcaaaatgtccttctccgagcggatatatgccagagggttatatttcatggacttcttgaagttgataagatttaggcttttgatgcggtatcccttgcgctccaggagagcccctacctcgcataatatcgtccccttcggatcggtgaccacatacgaagaatggcactggaggagcgaaggcttgacaaagaaccttgtctttccgctgccggaaccgccgatgaccaaaatattcttgttcctggcgtacttgggctccttggggcggctcgacatggtgatccgctccgtctgggtcatggggatgttgttgaaaaaatccttgtccatgtaaggggcgatgtcggcctgggtgccccagcgggcgctgccgtactcgatcccccggcggtatttcttcgcgttcttgcctttggagtagaccgccagccggatcagcaccgcgccggcggcgcccacgcacaggtccagcagatggaagctgggcgccaggctggcaaaggccgccgaaaagccctgcccgatatggagcagcttctccgaggcgtccgccccaggagccagccgcaccccctggcagagcttgtcaaagagatacacgaagatgagatacggaaggttgaggatgatctgctttttcaccttgtcggtcatcgcgccacctcccggtccttggccttgaccttctcccgttcccggtgtttggtcctggactgttcctgggcctgggccagccgctcccggatggtggggcgctcctcccggcccagagtcatggcggtgaactccttgaaggccggctggagctggtctttgtccttcgccttgaagaacacatagtagtgcggtgggtcggttgtggggtccttcttcagggcatagtcgatgtcatacttcttcgccaccgccgaaaacgccttgatgttctgctccgtgatctcgatgttggtcagggaagccccatgctgtttgagctggtgcagggtctgtttcccctggcggagggtgcgctgggagggcttcttctgcatctcctccagcaccttcttcacggccttttggagcaggtccgccgtcatcttgccggtctccaccgagagggagaccgcgccctgggtgatttcttcctgcacgcacatcacctccgatctccgccgccgtacatatcgtggctcaccagggaagtgtaatagctgccgatggtggccggggcgttatacagggcggccagcaggtattttttgatattgcggacataggtggtgttctcccgcatccggtccagcacatactcgatgtgggaactgttcagcttcaggaaccgggacttgaccacctccgccgggtagtcgtccccggcgatacggatcatctcccggttggagcacaccgtgtccaccatgagctccaccagctcgtccaggcggtcacggtcaaggcggtggttctggatgaggcagtcatactcgatgttctccaaaatcaattcccgatagctctcccgttcccgcatccggtcccgtcctttctggtccgagcccctgggggtttgggggattgataggacaggatttgatccttccgtacttgatagatctttttttgatttttctttacttgatctattagtatttaattgtgcggggtttccctgttcaggttcttccaagacaggggaagcctgttcaggattatccaagactggattttcccgttcaggtttttgcggttttggttccggcggtctgggctgctccaggatggtgtactcgatggcgccgagctggccgttggggttgcggacccgctggcggatcacatagccgtgttcctccagctcccgcaccccggcgcagatactgtcaacgccatccttgcagatccgggccagccccttggtggtatagtcccactcctccggcagggagagcatgagggagagaaggcccttcgctttcagcgagagcgacttgtcccgcaggtgatggttggacatcaccgtgtaatcgcgggttttctcaatgcggaataccgccatattggatacctccttccttcggttttgaaaagtgttcgtttcggcgggtttacgcccccatatcaccgcccggcctcccataaggaaaaggatatgggcggcctcgtttgcgccgcccacaggcgaaaaaacaggggatttcccaccctaaaacgcacactaaatttggggatagaaaaagggcgactgttaaaaaacagccgcccaaaagggggtctaatacaagttgtttgctatccgacaagcccggaaaccgttgatattacgggattttttgaaaagttctgtatcgccattcgtaccaaacgaaaggactttgcaaattgcagagtccttttttgttaaagcccgcagattttttaaatctgcgggctttgcttaatcttttacaatcgtcaatttgacggcgccttttgcaaattacgcctccaaataccgtttcagtgcgtccatgcgacgcgcggcttcctgacggccttcctcgtacagcgcttttaatttcgccgtgtccttttccgtgtgcgaaacgttcacgggtccctgcgggcggataacgaaaatgcggccttctttctctaagcggtcgatctccctttgctgggcgtcgtagcgcgtcggaacggcgtacagcgcactcaaaaacttcgggaaatgccggaaatacttcgcatacaaatgcagcatagagggctttgtgtaaagcttgcggtagccctgctggcgcgttaagaccagcacgatcttctcaaagccgtcatcgatggccttttggtacggaatcgccatggcacagccgccgtccaggtacagctcgccgttcatcttcacggctttcgagagcatcggcatactgctgctggcgcgaatagccgccaaaatatccgaacaagaacttttttcaaagtattccgcctcgccggttcttaggttcgtcgccacggcggtaaaatgctgcggcgatttataaaacgtgtcaaaatccatcggcagaatgctgtgtgacaaatcgttaaacaaaaagtcaaagttaaagatctcgtggtgcaagatgagattatttacgccaagatatcgcttgtcgttcacgtagtcgatgttaagctttgcggaacgccccggctggcgggaaacgtagttcacgccggtcaaagagcctgcggacacaccggtcacatcggagaaatataagttgtgctccatgaagacgtccaaaacgccggaggtaaagagcgagcgcagagagccgccctccaaaattaaagcaccgttttgcatttttaattcgtccatcacgttttcctccttgacatataaagtgatatgtaagtctaagtttgcgctttttcttattatagcaaaacgcccgatgcctttcaatggaaaaagaagaaaaaagcgcgcaaaacggggaaaaatcagaatcgtacttgcacacttttcatttctgcgttaaaataggcagagcgaaaataacggaaaagaaatgaggataaaattttgagaatccgaaagaaaaagtgggcgcgtccggagcttgccgcgtgcccgttttatgtgcacgagccgaaaaccgccgccggaacatggggcgagcgctttaaaaagcagcagcccatccatttagacctcggctgcggcaaatgcacgtttttggcaaagcttgcgcaccgagaaaaagacgtaaatttcatcggcatcgacatcagtgaagatattttgggcgtcgcccgccgcaacattgaagcggagttcggcgaggagcccgtggaaaacgtaaatctgctttcgtataacattgaaaagctcgatacgcttttttcgcccgatgaaaaagccgcacgaatttatgtaaacttctgcaacccgtggcagaaagccggcgaccacaagcgccgcctgacccacacccgccagctgaacacctacaaaaaggtgctcgcacccggcggcgagctgtggttcaaaaccgacaacaccgacctgtaccttgcaacgcagcgctatttagcggaagccggttttgaaattctctgcaaaacggacgacctgcacagcgaagacgcgccgggcaacattcagtccgagcacgaggtgatgttcaccgcagagggcatcaagacaaaagccattatcgcccgctggaacggcgagccggaaacgcccgaaagagttttcacagagcaggcagaaaaagtggaaaacacagccgagtaaattcacccttgcgctcgggccatacgtgggttatacgctcgccgtattcgtgctgcttgaggggttgctgtacggttttgggctgtggtggttttcgtatctctatatctgggcgattttggccgtcgccgcttggctgtttcgtaaaatggaaagccgcctcggctgggggcttctgtgcgggttttacgggctgattttcggcacgctcaccgcgatacccgtgctcattttaagcgaccctgcggcaacgctggcgtatatcatcagcggtatcccgttcgaccttatccacggtgtctcaaactttctccttgcctttttgctcctgcctaccctccgtcgcatcttagcgcgcctgacgagatcgctgaacatgggcacactgtattttgaataattatacgtaaaaagcacgcagattttgaaacactgcgtgcttttgcttttgaaatcttgaatttacgccctggtcaggtcaaaccgtttgatgaggcgcatgggataggtgtagatctccagcgcggtaacttcggcttgggtgaagacatcattttggaagacgagctcgagcgcgtcctgcagctccgtgatgcgcacaacgctgagcgtacagtggatgacgggcttgtcctccgaaacggcggagaagctgccgatgcctttgcagaacgactcgtatttttcgtggaacgcatagtaaaaatcgacaaaaggctttgcgtgtaccgggttcaggcacagcacggcggtttcgcggtgcgtggcatacggcggcagaaggctcacagagccgaacgtcagcttttggcgcgtgtgctcgcggacgaactcccctgtccagtcgcagagcgcttcggcatcgagatcttcatacgccgcaagcgtgatatgcggcggccactcggaagacgcatatcccgcgtttgtcatctcgcggcgcagcgcaatcagtttttcttctgtatttttatcaaaacgggcaagcacaacgtatcggttcatcgatcatagctcctttcaaggcttctgttatccgaacaggcgctttaggtgttcagcggaaaaaatggggtctttgtgcagggcatcgagtgccatttccatgttttcggcgctgtattccacctgcttggagtagtctttcgtgcagacgatgcgatcccatggggtgaattcgccggtatcacgcaggcactttgtgttcatcaggcagatgaaccacacactcacagcgcaaaagcccacgcgcgccgcgatgcggccgtcagtcacaccgtgtgcaaaatggcggtacagaaaatacacaagcaggttttcatagccgccgtcgatgtcgtcgagattcgcctgcaagccgttatcctccaaaagctgcacgtaatcgggccacgtttcgtcgtagggctccatttcggtcatcatgtcaaacaacgcggcgcgggtatcggtctcgtcagtcgtatcgcgttcggcaggcgacatattgccgaacagcgttttctgcgcctgcacgccgaaatcgagcaggcggtgcatgcgcacgcgcagcggcagagagcggtcctgcacgatggcaaatgcttcgtcccgcagatggaacacaagcggatcctccggcgcattcggcagctcgccgacgttcgttgtgatgaacgtgacgggatttttctgctcaaacagcagtctgcacgcttcttcacagcaaaggcccacgcccatttccacgcggccgccgagctcctcataaaagcgtgggtgttcgcggcaaatctcgcacaaagcatcatcgccaagctttaagataagctcgcagaggttgtcgtcatcgaggaacgggcaacgctcgttttcgccgaggcggaagcacaccgtgccgtccggcaggtcgcacagttcttcgcgcaggcggtcgccgagctctccttctaaattttcgtaatattcaacggtatcgggatcaacgtcgatttcccagccggcgcagcaggtatcggaacatgcggcagccgtgcagtgaaacgcgtcgtaaaaattcggtttgataaatttcattttgcttttatgtacttttacttctctttctcatcggtttcagtcggcgctgcatcgggctttggcagcgtgacttttctttcaaatataggcttcatgtgcgtggtgaagatgcggcgctccggttccggcagcgcattccccgcttccacgcgctcaatcaagagcttagcggctgcctcggaaaaatcgatcacagacggcaaatactgcatggaatagccgaagttcggcagcgtgttgtcatcgtcaaggccggtcaggtacacgtcctccggcacgcgcagtccggcggaatgcagcgcctgcagcatggtataatcccagccgcgcacaaagttgatgatcgccttcggcggaacatcccgacgggcaacgtcatgcaaaaacgcattcagcggtttcgtatcttcaatcggcgcaaggaaaatattctcctgcggcaccgtaacgccgaactccttgcaggcgtcacggaagccgcgcaggcggtcgcaacccggtctgtatatgggcgggtctgccatatatacaatgttgcggtagccgcgcgcgagcacgtcttttgtaacctcataacaagcggtatagttatcgatatacacgccgtcgcagtggattccttcaatctcacggtctacgcacacaacgggcgtgcctgtgctgcggatgtagtcgagatactccttgttgctaccctcgtcgccgtccacgggcacgatgagcagcgcggcgatcttatacgaaagcagatcgtcaatgagctctttttcacgctttaagctttcgtcggaattacacagcagaagacggtaaccgtatcgctccataatgcggtctgcaatgtaatacatctggcttaaaaacggtgcaaagatctgcggcacgatcacgccgatcatgcgcgaacggcttttggaaagacacactgcaatagcgctgggcgaataatgcagcgcttccatggcttcttccacgcggcggcgggcgtcttcgcccacatagccattgttgttgagcacacgggacaccgtggactgcgaaaccccggcagcctttgccacgtcccgtatggtggcctttttcatattcttttcttccataacttctttgcacggcagtgccgtgcgttctccccttcgaaaaatgatacaggtaaggtatgcggcctccgtgccgcattttgggtgtttcctgctgaaatactctaaaatattattgtaagtttttttaaacggattgtcaacaaatccggcgcagaaaccgcttgcatatgggcaaaatgtttgcaaaaagaagaatttttcatagaatttcgcacggcagctcacgccatgtgtaaactttgtatgacagggcacaaaaacgtttgacttttcgccgaaacttgggtatgataaaggtaatcaaaatcgcccaaagtgagacagtgtacggtctctttcagaatgttggcgaaccggaaaggatggtttatcatgaagtgtttgaacaaggtgctcaccattatcggctgcatcaccgctgccgttgccgttgttaccgccgcttttgccgtgctgaactatttcaaggaaaagaaagaaaatgccgagctggaagcgtatcttgaaggttccatccagtaacgaccaaactgatgtaaaaataagcgccgcggagtttcatttctccgcggcgcttgttttttacgcactcacattcaaaaacgaatcattattcattgtcacacctatgcaaaacctcaagcacaacgggaagctgggtttcggggttctttacggggcactcgaggctcatgcgggcgttgtagccgataaagtgcagcgcgcggaaaaatgctttgtaatccgcggtatcctgcggtgtcatgggtacgcggccgacggggtttgcgatgtgcgtgtgcacaaggatatcgccgcaccgctctaccatttccggcgtgccgttttcgctcatgaggtgatagtagtcgcacagcagcttaaagtgcgggtggttgacctctttgacaaacttcaaagcttccggctgcattgtgaaaatatttgtttcttcgtgccgcagcggctccagcgcgatggtaacaccgtacttttcaccggcgtcacctaagatttttgcgacagtttttagttgctcccacgctttttcgcgcgggaaattttccggtacacggcggctgccgccgctgccgaataccccgatttttatgcccgcctgcgccaatcgccctatggcgtgatggacgtatgtttggatcgcttcaaaatcgacattgtcacccgtcagcttaatactgcccggaaacatacagtttgccgcctccgcgtgaatgggtgcggcttcatttttttgcagaaaatccgcgaactgcgcctctgtcatctctgcaagtcccacaacgctgacctcaagataatcaaacccgagctttgcgataaattccgcctgctcgatcggcatacacacaccaaaccgcatggcaacccctccaaagtctttttctcattgtagtccgcgcacgcggaaaaagcaaggaaaacacttgcaaacgcgcataagtttttctataatgaaggcaaataaacttcatttgggaggcttgttgtatggaaaaaatcaaacttggcaaaagcggacttttggtgccgcctatagccctcggctgcatgcgtcttgcgggcgcagagcgcacgcaggcagataaatttctgcacaccgcgttggagcttgagctcaactttttcgaccacgccgatatttacggcggcggtgcatgcgagcgtgtgttcggcgagatgataaaggacgcgggcattcgccgcgaagatcttatcattcagtcgaaatgcgccattgtgcccggcaaaatgtacgatttctcaaaggaacacattttgtctgccgtagacggcagcttaaagcgccttggcacggattatcttgacgttttgcttctgcaccgtccggacgctttaatggagccggaagaagtagcggaagcctttgacgaactcgaaaagagcggcaaggtgcgtcacttcggcgtctccaacgaagacccgtacacgatggagcttttgcagagcgctttgcatcaaccgatctgcgcaaaccagttgcaaatgagcctgacaaatgccacgatgatcgcgcagccgatgaatacaaacatctgcgacggcttaaacccggtgctcgataacggcgtgttgaactactgccgtctgcacaacatcaccattcagacgtggtcgccgttccagtacggcttcttcgagggtgttttcatcggcagcgaaaaatacccgaagctaaacgcaaagctcgacgagctggcggaaaaatacaacgtgacaaacaccgccatagcgcttgcgtggattctgcgtcaccctgcaaaaatgcaggccgtcacgggcaccatcaatccaaagcgcctgcgcgactgcgccgccgcgcttgacattacgctcgcgcgcgaagactggtacgcgctgtaccttgcagcgggctaccgtctgccgtaaactttcgcttgacaaatgcgccgcgctcccgtaaaatatgggtataaaagggagtagcaaacaggaaatatctgtaatgtatgcgtcagcacgacggtttccccgtccgtatacgttgtaatctgcgagacttttatcatgccgcggcaggatagaagtctcttttttattttctttcggagataaagattttgcaaaggcggcaaaaacatccgagaggaaggtatgaaaatgaactttttaagcgagcttttcgcgaacgtgggcaatgtgacgtggcagcacgcggtaatgtggtgcataggcggcgtgctcatctaccttgccatcgcgaaaaaaatggaacctgcgctgcttttgcccatcggcttcggtacaatccttgtcaatctgccgctttccggcgcggtgacgcagggcgaagaagtgggcgtactgacgttattatttgacagcggcattgcaaatgagcttttcccgctgctcctcttcatcggcatcggcgcgatgattgactttgagcctctgctctcaaacccgaagctgtttttattcggtgcggcggcccagttcggcattttcttcacgctgagcatggcgcggctgtttaactttgacctgcacgacgccgcctccatcgcgatcatcggcgcggcggacggcccgacctccatttttgtcgcgaacgtcttaaattcgcagtatatcggcgccatcaccgtggcagcatactcgtatatggcgcttgtgcccattgtgcagccgccggtcatccgcctgctgacgaccaaaaccgagcggcgcatccgtatggcgtacacgcccggctctgtctcaaaaacgaccaaaattctgtttcctgtcctcatcacggctgtcgtcggcattgtgtccaatcgctcggcggcgcttatcggctttttgatgttcggcaatctgctgcgtgagtgcggcgtgttaaacagcctttcggatgccgcgcagaacgtgctgtccaacttgattaccctgattctcggcatcacgatcaccgcgcatatgacggcggcggaatttttgcgcgtggacacactgcttattttgggactgggcctcattgcattcgtgtttgacaccgtaggcggtgtactgtttgcgaaaatcatgaacctgtttgtcaagaataaagtcaaccccatgatcggcgcggcaggcatttcggcgtttccgatgtctgcacgcattatccagaaaatgggacagcaggaagacccgcagaacttccttttgatgcacgccgtaggcgccaacgtctccggtcagatcgcgtctgtcatcgcaggcggcatcatcttaaacatgatccattaaggaggataacgtatgttcaatgttcccgcatttttagacagcttacaatatatggcaaaaggcatgaccggcgttttccttgtcattgccgcaatcattttgagcatttacctcttaaaccgtgtgtttaaggcaaagtaaaatggatcaggagcgcaaaagataagtttgtcctcgtcggcttcaaagaagccgagtggacgaaaaggatgaaaaagggatgcgtgctgtcagacaaaattcctttttcgaaccatgagcaagcgccgcagagttcccgttctctgcggcgcctgttttttacgatttttctttcggctttgcgatggcggccatcaggcagctgaagaagacggctgcggcaatgccggcggcaccggcggtgattccgcccgtgaacacgccgagaatgcctttttcttttacggcggcttttacaccctcgctcaaaagatatccgaaaccgctcagcggcacggtggcgccgcaacccgcgaaattcacgagcggtgcataccacccgagcgcgcccaagatcacaccgcccgtgacgtaggccaccatgattctggccggggtgagctttgtcagatcgatcaaaagctgaccgatcacacagattgccccgccgaccgcaaacgcccttacatattccatgtgaaaatccacgcctttcgttttatacgttttctttgggttattctgtgcggaataacccaaattatgacgcgcagaataactgtgcaacgttaaaacaaaaggagagtgcagcatgaaaaaaatcgcattttttgatacaaaaccgtatgaccgcacgtggttcgacattctggcaaagcactatgaaatcgcgtactttgaagaaaagctgaaccgccacacggcgacgctgacagacggctttgacgccgtgtgcgcctttgtgaacgaccgtgtagacgcggccgccattgaccgcatgcaccgctgcggcgtgcagcttttggcactgcgctgcgcaggcttcagcaatgtggatatgcaggcagcagcgggcaagctgcgcgtggtacgcgtgcccgcctattccccacacgccgttgcggagcacaccatggggcttttattgacgttaaatcgccgtttgcaccgcgcctacatccgcacgcgcgatttcaacttcagtattgtgggtctgacgggcatagacctctacaaaaagaccgtcggtatcatcggcacggggcgcatcggccgcgcatttgcggaaatctgccgcggctttggcatgcgcgttttagcgtatgacaagtatcctgcgccggactttgagtacgtttcgctcgatacactcctgcgcgaaagcgacgtcatctccctgcactgcccgctcagtgaagaatcctaccacatgctcgaccgcgaagcgtttgacaaaatgaaaaaaggtgtgtttttattaaacacctcgcgcggcgcgcttattgacagcgaagcgcttttggacgcattgaataacggcaccttgcgcggcgcgggactggacgtttacgaggaggaggcgaagtttttctttgaagaccattccgacaccgccgtacaggacgacactttggcgctgctcatctcccgtccgaacgtcatcttaacggcgcaccaggcgtttttgaccgaagaggcattgtataatattgcggaagtgacagtgcagaaccttgatgatttctttgccggaaagccgcttaaaaacgaagtgtgtatccgctgtgcaggaaattgacctgccgcgaacgcacacttttcaaccgttttttacttttctgtggaaatcagggcttaatattccaagccatacggccaatcgaccaagctgccgatgtcgtaaatatgcgtatagccgtaggattcgagcttcatcgccgccataaagctgcggcggccgctcttgcagtaaacaagaatcggcgtatcgagcgtggggatcttttcctccgcggtgtcttcgtcaatggtatccaccgggaaaagcacggcgttttcggcgtggcccgtgatgtattcgtcttcgtcgcgcacgtccaagatcacgcagttcggctcggtatcgatgatatgctttgcttcctgaaacgaaacctttttatatgattcttccatggcattcctctcgtcttcactgaaaagccccggggcaggtgctccggggctttgttacggataaacttaacttagatctgaaccttcttgatgatctccttgaggcactcagagctatgtacaagcgcggcatgctcgctctcggtcagcggcaggttgagcttattcacaacacccttgtggccgacggtggtgagcaggctcaggcagacatcgctgataccgtattcgccgttcagcatggtagaaaccgtcatgttggtatcgatgccggagaggatgcactttacgatatggcagacggaaatggaaaccgcatagaacgttgcgcccttgcgcttgatgacgttgccgccggacttgcgcatgtaatcctcaacgtccgcatagttgagcggcggaatcaacatgccgtcggtgttttccatagccttctggtatgcgtttgccggaatgttggagatgttcgcaacggaccacggcacgaaggagctgtcgccatgctcgcccagaacgtaagcgtgtacgttctgctggttgatctggtagtactcggagagacgtgcacgcagacgggcggtatcgaggatggtaccggaaccgaggatgcgggactccggaatgccggagcacttgcagaacgtataggtgaggatatcgaccgggttgctgacgaacagatagattgcatccggtgcgtacttcgtgatgttcggcgtgatgctcttgatgatgttgacgttcgtctgtgcgaggtccagtctggtctggccgggcttacgggcaatgccggacgtgatgataacgatgtcggaatcctttgcatcttcatagctgcccgcgtaaacggaacatggcgtgcagaacggaacgccctgacggatgtccagagcctcgccctttgccttttcctcgttgatatcgatcatgacaatctcggaagcaatgccctgcacggtgagggtgtaagcgatcgtggagccgacgctgccgctgccgataatggtaattttattcatagttcaaaccatccttttttcagtatagttgcagaattttggattatcgctttgattatagtatattcaggggaataaatcaagtaattttcggcgttttgggcgcattctgcgggcttttggggattttgtcaaagctgtgtcaagcccgtgcgaaaaagtgaacaacatgcacggacaccgcagtcgtatggcaaaacgcgcatgtctttgtggcgctttttatttattgtagaccttttccatgacgtaggcaatgttcgcgatgccgccgtcctcgcggtggaacatgccgtcaaacttgcgggcatagagaaatttgcgcccgaggaactccgcttcgaaccggtcgtcgtcatcgcttaaaatctcctcgcacagtatcagcgcttcgtctacgatgtacgccggaacagcctgcagaccgtgaccgccgtaaaacttgtcgatgcccttaagatatgtcgcaaggtggtcgaggcttttcgcatacgtctcgactgttgtggagcacggcaaaccgagcagtgtgttcgcattgcaggcgtcgccggaatacagaacgcggcgggcacggtccagatagaccatggttcccacggtatgacccggcacggcaatggcctcaatctgcacgccgccgaggtcgaacacgtcgccgtcttgaacaggcagcgtcttcactgcgcacggcggcacaacgtcttcctttttgggcacaaacgccccctccggcttgccgccgcccatcacaaatccgtagcgcttatcgatgtcgccgtgctcgtacaaaagcgcaacgtccgccgggttcacatagcattccccgtactcaaacgatgcgccagcgtgatccacatgtccgtgcgtcagcacaagcgtaacgggcaaatcggtacattcgcgtacaaacgctttcaaactgcctacgcctgtaagaccatcgataagcagcgctttttcactgccttcgatcaaatagcaaagctcgccgcccagaccgccgatctgcgtaacattgtcaaaaatctttcggcttgtaaaaaacttggacaaaataagcgcctcctccgtaaatttgcggctctgccgcctttttataaagcggctgccgtctgcgccgctttcctgcatttttcgcttttattatacgatatcgttaaaaaaatgtctataagaaaatctcggcttacgggactttttacattgcatttaaaacagatttttatcatacggaagtactttacggcccttctaacggtaaaccgcgctttttatctgccgttttacgaaaaaaggcaaaaaagctcttgcattttcgggggctatgtggtatgattatgtctgcgttattggagttcaaggcgaatctatgcccaccaatacggttcaggcggtttcgccgtactataatcctacgatcgaggaggtgtctactgtgcccaacatcaaatccgctaagaagcgcgttaaggtcgctgccgcaaagaccttgcagaacaagatgatcaactctcagctcaagacagagatcaagaaggctaacgttgctatcgagtccaatgctgctgacaaggctgaggctgtcaaggtcgctgttaagagaatcgaccaggctgctgcaaagggtattctgcacaagaatacggctgccagaaagaagtccgctctcgataagaagctgaacgctggcgcgtaattttcccaacatcgcaatgcattagacgactgctttcgggcagtcgttttgcattttacggcactttttaaagggaataagtaaggcggaagcaggcttttcggcctgcttccgcctttttgttttgcggatttttcttaccacaacgactcaataaataccatggcgtacaaaaagatgctgaacgcggtcgttatcatgccgatggtaagtccggcgacggcgaggcctttgccccgctgaaagctcttcttaatctgtgaaagccccaatgcagagaacacgatgccgaggattgacagcggcgggaatacacacatcagcacaagcgcgacacacgaaagcacaaagcccgcgaccgcgtagccgttcatgcggttattcatcggcatcccatacggccggtagagctgcacatacggatttttcggttcttcaaactccgagttcggcgcaagctgtattttcgcttcactgccgcagtttgggcagcagcgcattgtttccgggtacacagtgccgcattcatagcattgtaccatttctccacctcatttttgctctttttcccagtatatcgggttttagtagccttgtcaatgcccgtttctgtccgcggcagacgggcaaaaatgacaaatttgcccatgtgcaaaggattttacgattttatgaaaaaatctttaaatctctattgacaatcatacgattatgttgtatactctcaccatcacatagaaggagatgaacaaagtggagtggacacttcccggaacggtgctttccgttgacgcagaccggccgcaggcggcggaggaagttttttcttccctgtttttagccggcgggctggtgctttcgcaggtgacgcaagtcacggggctggagccgtacatcattcaaaactgggtgcggcgcggctttttggcgccgccgaagcagcgcaagtacacgcgccgccagttgagccgcatcttaatgatcaacgcgttgaaaagcacgctttccatcgagcagatctgcaagcttttaagctacatcaacggtgcgctggacgatgagggcgacgacaccatcgacgatacggagctgtacggcgcgttcgtgctggtggcgggcagcgtgcagaagcacggcttgacctcggaaagcgaaatgaaccgtttgattgcggacggccttaaggactacaaagagccaagccccggcgcgaaagagcgaatcgagcaggtgctgcgcattatgattaccgcatggcgtgccgcgcagctgcaaaccaaagcgcagagcatgatgaacgcgctctgcgtgagcacagattttgaaaaaggagaaatttatgtttgaggaattcaagggcaccgagattcccatcccaatgcccaaaaaaccgagcggagactttttaaagaagctgccgaaaatcgtgctcatcgtcgtgatctccctcgtactgctcgccgctgtggcaagctcttggtacaccgtgaacgacaaggagcaggccgttgtgaccacgttcggcaaggtgacggacattacggatgccggcttccactttaagctgccgttcggcattcagaaagtggaaaaggtcaacgtgaatgtctaccagaagatcgagctcggctaccgcagcgtcggttccgccgataactttgacatcatcgaaagcgaaacgaaaatgatcaccggcgactacaacatcgtcgacgtggagttcttcgtggagtacaaggtcagcgaccctgaaaagtacctctacggctcgtatgacccggaaacgattctgcgcaacctgctgcaaagtcaggtgcgcaacgtggtcggctccgaagccgtggacgccgttttgacgaccggcaaggaatccatccagatgcgtgtcaaagagcttgtatccgaaattttgcaggaatacgacatcggtttgacgcttgtagacgtaaaaattcaggactccgacccaccgaccgatgaggtcacggaagcgtttaaggccgtggagaccgcaaagcagcaggcagagaccgtgcgcaatgaggcgcgcgcctaccagaacgcacagctcccgcaggcggaagccaaagccgacgagctgctgagaaacgccgaatatttgaagcagaagcgcatcaacgaagcgacggagcaggtcgcgatgttcgaggccatgtacaaggagtacagccagaacccgggtatcacacgctccagaatgtactatgaagccatttccgaagccctgccggacgtgaaggtgtatatcgatacctccggcgaaaacggcgtgcagaaggtgctgccgcttgaaagcttcacacagggcgaaacgaatacgcccgcccccgaaaaaggagaagaatgaccgatgaaaaagaaaaccgtgatcctcttggccgtgcttatactggcggctgtgtgcctctttaattccgtgtacaccgtggaggaaaacgaatacggctgcaccgtgcggctctctaaaatcatctcgacgaccgatgagccgggcctgcactttaaagtgccgtttttggacagcgtgaagtccttcccgaaagccaccatgctgtatgatattccgccaagcgaagtgctgaccgccgacaagcagaacatgaccgtggactgctacgtgctgtggagcgtctccgacccgctgaaattttaccaatcgctcggcaacacgagcgttgctgaggaacgcttaaacgcgctgacctacaacgccctcaaaaccgtaatgggcacgctttcgcagtcaaacatcatcaatatggacgacggcgcagcgcgaaacgacatttacgagggcattaccacaagcgtcgatacgcttgccgcaaactacggcatcaaggtcgaggacgtgaaaatcaagcgctttgacctgccggaggcaaacgaaagcgccgtttatgcccgcatgatctccgaacgccagcagattgcggaaaaatacaccgcagacggcaactacgaagcatcgctcatccgcaatgatgtcgataagcaggtgaacatcattgtctcgaacgcggaggccgaagccgcaaaattgcaggccgagggcgaagccgaatacatgcgactgctcggcaaagcgtacaataccgaggataagcaggagttctacaaattcacgcaggcgcttgaagccttaaagagcaccttaaacggcgacgagaagaccattatcttaggcaaggattcggacttggcacagattttgacgaatccgtaaagcctgatagccaccccggcaaaactggggtggctatttccatataaacgagaacggcacagcccgggaggaagcccaaggctgtgccgttctctattcaaatcacataggagtcttatgatctcaaattattcatcgaagatggagacgatctcgccgtctaagatgcggttcatgttcttcaccgcgcagaagttgccgcacatgctgcacgtgtcttccttctccgggcgggaggattcgcggtagtggcgcgccttttcggggtcgattgcgaggtcaaacatcgcgttccagtcaagcttctttctggcaactgccatttcgttgtcccaatccatcgcgtgcggaacgccctttgcgatatcagccgcatgcgctgcaatgcgtgccgcgatgatgccctccttcacatcgtccacgtccggcaggcgcaggtgctctgcgggcgtgacgtaacacaggaacgatgcgccgttcatggctgccaccgtgccgccgatggcggaggtgatatggtcatagcccggggcgatgtccgtgacgatcgggccgagcacatagaacggtgcgccgtggcacagtgttttctgaatttccatgttcgccgcgatctgattgagcggcatatggccgggaccctcgatcatgatctgcacgtctttttcccacgcgcgcttggtcagctcgccgagcgtgatgagttcttcaatctgcgaagcatcggtcgcgtcctgcaggcagccggggcggcatgcatcgccgagactgagcgtcacgtcatattcacggcaaatgtcgagaatttcgtcaaaatactggaagaacgggttctcctcgccggtcatttccatccatgcaaaaatgatggagccgccgcgggaaacgatgttcatcaaacggcggttgcgtttaaacttcttcgccgtctctttattgatgccgcagtgaatggtcatgaagtctacgccgtcctccgcatgcatgcgcacaatgtcaatccactcgcgcgcagtgattttgccgagcgccttgtggtagtaaacgaccgcgtcatagatcggcacggtgccgatcatcgccggacactcgtgcgtcagcttgcggcggaacttctgcgtatcgccgaaggagctgaggtccataatggcctccgcgcccatttcgaccgcatgattcactttttcaagctccatgttaaggtcggtgaggtcgcgggacgtgccgagattgacgttgatcttcgtcttcagcatggagccgagaccgttcggctctatgcatgtatgcaccttattgcacgggatgatgaccttgccctccgccatgagcgccatgagttttttcggctccaagtgctctttttcggcaactttcgccatttccggcgtaaaaatgcccttgcgggcggcatccatctgcgttgtgtattccattttctgttcctttcctaatgcgtgtttcggaacaaaagaaaagggcatgtgataatgacacatacccggatatttccgttccctacgttggcattatccaaatcaggttattcgggtcgagggtcacaccctcctctcagcccgtatacgagcaccccgtttattattttttgcgttttccgcgtacttactctaccacgccaagtgcgttttgtcaagattttgcctgtattctcggcttagtgtccgtgcacgttgatctctttctcgctcaatttcgaataaataagctgctgtccggaataaaggctgaaatagcccgaaaacaggaagcttacaagcgccgcgatcatgcagaacagtgcgctttcgccgccgaagagctctacgctgagcagaattgtcgcaatggggcagttcgtcacaccgcagaacagcgccgctatgccgatggccgcaccgaacgcgggactcagaccgacaagcagcgccagcgtaccgccgagcgtggcaccgatgaacagcgtgggcacgatctcgccgcccttaaagcctgcgccgatcgtgatggaggtaaagattatcttgagcaagaatgcctcgggacgcacgacgccctcttcaaaaatgcgctcgatgacgtccataccgccgccgttatacgcgcgcgtaccgacaagcaatgtgagcaaaatcaccacaacgccgccgaccgccgcgcggagaaattcgtttttaaaaagctttttgaagagctttgcgccgctgtgcatcgcccagcagaacagcatactggcaatcgcacacaaaatagcgataacgagtacacgccacattgtggaaatgtcaaatgccgggacattttcgacgagaaaatgctccggggcaacgcccataaccagcgccagtgcataggcagacgcagaggacacgatgcacgggaacagcgccgaggtgcagaagcggccgacgctgacgacctctatcgcgaagacacatgccgccatcggcgtgccgaataccgccgcgaacacgccgctcataccgcacatggtgagaatgtggcggtcttcctcatttaaacggaacagcttgccgaagaacgtcgccacgcttccgccgatttggagcgccgcgccctcgcggcccgcggagccgccgagcaggtgtgtaatcgttgtgccgaggaaaatggccggcgcaagcaaaatggaaacacctttattgctgcgtacaccctcgaacacctcgttcgtgcccacgccggaaacgcggcaaagtttataaacgcccacaatggccaaaccgccgacgggcagcaaatataaaagccatgggttagcgccgcgcatggccgttgcccacgcaacggattttgcaaacagcgcgccgacgaagccgccaagcccgccgacaagcaagcctaaaacgccccaccgcaaaaacgccgcaatgtacgcccacacattttccgcaagcgagcgaattttctctttgttctccattgttctttcctcacttagttcatgtctttattgacaaataaagtttttgatcaacttttttcaaaaagttggtcgagctccgcagagctcgaaatccttttgcctaccaaaaatcaggacggaacttccagtggacgttccgtccgtgggagacccaattagggggtctcccaaaaaggcgaagccttttagaatttactttctcacaaacaaaacgcccagcgtgttcgggccgcagtgactcgagaccgtgcagccggcataggtctccaacacctcgtcgaagccgccgcattccttgatgatcgcttttacattctccacaatctccggcgcacagcccgagtgcgtaatgaaaatgcgatttcgtcttaaatcgtctctgccctgcaaacgctcgcgcacatactgtgcaatgcaattgtcgatcttgccgcggtactttttgcccacgcccatttttccgtccttcacttcaatgcacggctttagcttcaataaattcgcgccgagcgccgccaaggtagagcatctgccgcccttttgcagataaaaaagcgtatcgatgacgaagctcgcctctacttttttcgccgtttcgcgcatgagcgcggcaatctctttgggatcctcgcccttttccgcacgctctgcggcatccaaaacgagcagcgcgatgcctgtggaaagatttcgggaatcgaccacatacacgttttcaaactccgccgcagcggtgcaggcgttctggtagcagctggaaaaatcactgctgatattaaaatggatcaccgcgtcgtaattttccctgcattttttgaaaaatgccgtgtaatcgcccacgttcacggcagcagtgcggcacacgcccttgccggagcgcacgtagtcgaaaatctcctgcggcgtgatgtctatgccgtcgcgacaattctgcccgcccttttcaatgtacagcggcgtaatgccgatattatacgtttcgataagctccggcgacagatcgcatgtgctgtccgccgaaattttaatcctcattgcagaattctcctctccgctttcgattcgttttacggtgtttatgctgtttcagtatacaacagcccgcgctttttttcaagatttcgcaccgtttccggcatgatttttccgtctctttcataaattttaagacattcttacattgcgcaaaaacgcttgcatctaaagaaatttttcgctacaataaaatcacaaaacaaagatgagaggagaccgtatatgcaaggtcaaaattacaatccctacaccggcgcaccgctttccggcatagatccgcccgccggttatccgcaaaaaagccgtatcgcagccggactgttcggcatgctgatgggcacattcggcgtacacaatttttaccttggcaatacacagcgcggactgatccagattttggtcgctacgctcggcgcgcctctcacctgcggtctttccacagttgccgtgtggatctggagccttgttgagggcgtgcagatcttagaaggcaagatcaaaatggatgcaaacggcatcaagctgaaggactgagaaaggagatctttatgacagacgaaaaaagcacccggaacaccaccccggagaccgcaaagccggagccgaccttgacgaatcccgtagagcagagctttgccgaagccgagcgccttgcggagcaggcagaagccgccgcaaaagacgaaccgtgctgcgatatgccgaaagccgaagaagctgccccggaagcaccgaaaacggaggtgccaacgccgccgcagtatcagccgccgcagtacacctatgcggcctacaccgcacagccgcagcagcccaccccgcaggagggcgcgggcgactaccgccccccgcgctacacggagcagtaccaggcgaacgccaataatgcaaattataacaacccgcagcaaacctactacgccccgaacggccagccgcagtatgggcagaactacgcacagccgtatgacccgccgcagggcaccaaaagccgcattgcagccggtgtgctcgccattttattcggtgtgttcggcgtgcacaacttctacatcggcaaaacgggccttggcattgcacagcttgccatcaccgtttgcagctgcggcacgcttgccatcgtctccgaaatttggggcatcatagaaggcgtgcgccttttgcagggcacaatcgatacaaatggttacggcatgaagtttgttgactgagcttgattttataccattgactaaaattccaaaacagcaaaacccgatgcagccgaatccagactgcaccgggttttctctgttctgttatgacgatataaacgcgtttcttatttgaccggcagccagacacgcatctggttttcgccgcggtttgcccatgtgtaatacgggataaggcggattgtcttttccacaaatttcggagcctttgtggaatacagcgtgtcgatgtcttgctgtgcgcagcctgcgatctctacgggcacaatgccgccgagcgtttcgggctcaaaatcgagcgccttcggctctgcaccggctttaacatacagcggcagcaccttgccgttatcgacttcctctgcgcagtagacgagcgcgccgcgctgtacacacaccttgccgctgtccgccgcgatctttgcggaggcgtacacaacgtgcggggtcatatccatggtgagcgcaagcgtatcgccgtctttccatgcgcgggtgatgtaagcgtaaccgtcctttgtcacggcgttaaggtcaaccgcttcgccgtttacggtcagcaagctcttttcgctccatgccggaatgcggatagcgaccgtcgtttccgtttcgcccttaatcgtatactttgccgtgccgccgtgcgggaaatcggtctcgcaggtgagcgtgatgcccttttcggtcttcaccgtgccgcctgcatagaggtcaatgaagaacgtgtcttcattttcgctgtacgcataggagccgaaggaagacaccatgcgcgccacgttcggcgggcagcatgcgcaggcataccactgcgggcgggtgggcagcactgcgcggtgcgtgacggccttgccggaaatgcccggtacgacctcaagcgggttcacatagaagaaacgcttgccgtcaagctgcatgccggcgagcacggtgttgtagaacgcgcgctccatcacatcggcatattcgccgcggtgctcgttttcaagcatcttcttcgcgaagaacatcagaccgatggaagcgcaggtctcggcgtacacggtgtcgttcggcaggtcataatcgaccgtaaaggcttcacccataaacgtggagccgatgccgcccgtaatgtacatgcggcgctttgtgatgctctcccacaaattgtggcaggcagcaagcagtgtctcgtcctgtgtttcctttgcgacgtccgccatgccggtgtaaaggtacacggcacgcacggcgtggcccacggcgtccttctgctcacgcacgggcagggtgctctgggtgtagtcggtattcagctcctccgtgccgtcccaaacgttccagccgcggttctttttttcttccacgaaataattcggggcctgaccgcgcacgtctacaaagtgctttgcaagctccttatacttttcgttgcctgtggcgcgccacagacgcatcagtgcaagctccacctccgggtggcccgggaaggcgcgcgtgtttttcttcatgaattgctcgtaaatgcagtctgcattcttcgacatgatgtcgagcagctcgcgcttgccggtgacctcataatacgccacggcagcctccatcatgtggcctgcacagtaaagctcatgtgcatcgcagatgttcgtccacattttgtcgggacacttcacggtgaaataggaatcgacatagccatcttcgtgctgggaagcgccgtagagctgaatggtctcgtccacggccttttcaagctccgggtcttcgcccgctgcaagcgcataggctgccgcttcgatccactttgcgacatcgctgtcttggaacaccataccgtagaattcgtccggctttacgtccttgcccctcagcttttcagctgcaaggcggatattttcaatggcgtggctcttttcgacacccgggatggcgtcgttcaggatattatactgatacggcagcacctcctcgcgcacgagtttctgcattttgccgatgaaaccgttatcggcggaaaaggattttacggggatacgttcgcttttcatctttgtaaacctccatcatgaacttcaagttgttcgtacatcttttatagcacattcaaccggagaatgcaactgttttcggaaaacttttattttgatacggaaagttcatgaaaaacggttgcaattttcacgcgttgcaggtaaaatcaaactataaaattttttccgagaaaatcgaaccagaaaaaggatgcgtgccgcatggccataaagataaaagggaaacttccgcttaaaatttgcagcgtgctgttcgttttgtacggtgcagcgtcgcttgtggcgcttctgctgtgcctcatcgaccgaaaatacgtggaggaatacgacctttccgcttactttaattcctctatgccggtgctgtccgttgcgggcgcgatgcttgtgcccgttttgctgctcattgcggggctgatgggccacgcccgtgcagaccgcccgaacagcatgaagccgtgcttttttctgggccttgctaccggcgtcatcattcttttcaatgttttgtatgagattttcaccggcgatgcgccgaatctgccggaaatctgcacctatgttctcgacctcgttctccccgttctctacacgttctgtgcatggctgaactggaggcacaagggagacgacacgccgaaagccgcagatgccgaccccgcacccgcttctaaatcctgatcgttccctttagataaaaaactcaagcacgcagaactttcgagtctgcgtgcttttcttttggcttgtccggtttttgaaaggcggtttgtgaccgccttttaggaaacccatgcaactgggtttcctacggattgaacgtcccccggacattcaatcctactctcctagttttttgttaggcaaaaagatttcgctttctgcggaaagcgacgtagggctctgccctacgcacccgcaagttttctgaagaaaacttgactaaagactttaaaccgccgttaccgcgggctcgtcagttcatcagcgctttatagatttcgcctttcttaaatccggaaagctttgcggcctccttagcggcgtcactggcggagctgccgttttccatcgctttttttgcggcttctacggcatcctctaacgtcatttctttctgttcttccaccttcgcaccctcaatgacgagcacaaattcgcccttcggggcgttctgctcgtagtattcggcggctttatataatgtcgtgcgcacacactcctcatggattttcgtaatttcccttacaagcgcgatgcgtctgtcgccgaacacctccgccatatctcttaacgtatacggcagcttatgcggcgcttcgtagaacaccatggtgcgcacttcgtttttgacggactccaagtggtccttacggctctttttattgacgctcaaaaagccctcaaacgtaaatctgcccgtcggcagtcccgataccgccagcgcggaaatgacggcgctcgggcccggcacaacaagcaccggcacgtcgtgctcggcgcacaacgccacaaggtcttcgcccgggtcggagatggccggcatgccggcgtcagagacgatggcgcacgtttcgcccgccaaaatgcggtctacaatgcgcccgcccttttcggccttgttgtgttcatagtagcttacaagcggctttttaatgccgaagtggtttaaaagcttcatcgtgacgcgcgtgtcctccgctgcaatgaaatccaccgccgccaaggtctccgccgcgcggggcgaaaaatccgacaaatttccgatgggcgtgcccaccacatacaatgcaccgcgaagcagtttattttcttccatctgcgcgtcctccctcgtgaccgaatttgtaattcccgtaaatttccagcatttcggcggaaaacccgccgttttcgtcttctataataagtgtcggcagtacggaaagccccggtttgccgccgcgccgcacttccagtaaaaacagagacggcgcggtgtttatcctttgctgtacgagccgcagccttttcggctctaagccgtagcttctaaaagcattcattgcgtccgcaaggcgctccgggcgctgacataggcaaaaccggccgccgaagcgcagcacgtctctgcccgctttcgcgacatcttcaagcgtgcaggtgcactcgtgccgcgcgttttccatgcgttcgtccgggttgcgcagccccgcgcccacggccttatacggcgggttacacgccgcaagatctaacgttgggtgcggaatgatttttttgatctcccgtatatccccccgaatgacctcgatattttcttcatacccgttttccgaaacggagcgcaaggcctgcgaaaacgcctgttcgccgagttccaccgccgtgatgtgccgcggggcgtaatttgcctgccacagaagcgaaatggtgccgcagcccgtgccgaggtcaatgcagcgttctttgtgtttcggcgcggcaaaatgcgccagcaaaatggtgtccgtattaaacgtgtgctcgcggctgacgagtacacggcaggcaggcgcaagcggctcccagtgcagattttccacaggttttctccttttggttgaattctcacaagcttccgataagcgtggtcaaaagtttttgatcgaccttttttcaaaaaggtcgcggggttttggggcagcgccccaaatcgttgtccgcagacgacgaaatctttttgcctgccaagaatcaggacgggagaggaaacagtccggtggactgtttcctcgtgggagacccaattagggggtctctcaaaaggcggcaccgccgccctttaatatccgcaagttttctcgaagaaaacttgactaaagacttttaacagcaaaagaaaaaggactgccgcttgggcagccctctcttttacgcaatgtcagcgattatgcctgctccggagcggaaaccgggcaagtgtcagcgcaagcgccgcactcgatgcaggtatcagcgtcgatctcgtacttgccgtcaccctcggagattgcggaaacaggacatgcgtctgcgcaagcgccgcaagcgatgcaagcgtctgtaattttatatgccattttaggacacctccatgtatttgatacctacattctaacacaaatccatgaaaatgcaagcgaaaattgcttttttacagatacgtaacaaaagcccgccaaaatacaggtacttttagttctccagcttcttaaattcctcaatttccttcttattcagcttgatctgcccgtctttcagcacgcgtacgtccttcactttgtagacgctcggcgcggcgtccgggctcttatcgagccgcacggtcagttttccggtaagcaggttctggtcgataacaacgcccttgccgtccggcgtggaaaccacagcgttcaccttcggcgtggtacgcagcaggtcaaggtatgcctcctgctcatatttcaggcagcacatcagtctgccgcacgtgccggagattttcacagggttcagagaaagcccttgctccttcgccattttgatggagacaggctgaaagccgccgaggaacgagccgcagcagaacggtctgccgcagatgccgaggccgccgatcatcttcgcttcgtcgcgcacgccgatctgacgcagctcaatgcgcgtgcgaaacatgcccgcaaggtcttttaccagctcgcggaagtccacgcggccgtccgccgtgaagtaaaagaggattttactgttgtcaaacgtgtactccacgtcgacaagcttcatttcgagtccgcgctccgcaattttcttttcgcactgcgtgaacgcattttttgctttcagttcattttccgccacgcggcgcaggtcgtcttttgtcgccttgcgaatcacttttttgagcggctgcacaatggaatcatccgcaacatcgcggttggccatcgccacttcgccgcactctacgccgcgcgccgtttctacaacgacgtggtcgtcggcggagagcttctcgctgttcgggtcaaagtaatacaccttgcccatgttcttaaaacgaacaccgattacttctgccatatttatatccacagcccgtaaagggcttcctttctttccgggaaaatccgtattgttattttgacaacacggacgatttttatttcaaaacaggctttatttgcccgcagtttctttcatttcggcgcacagcgccgttacaagcagcgccatgttcgcgtttcgccgccagtattccgtgtattttgccgtcatttcgcacagcgccatcagcgcttttaaagacagcttgcgtcttaatttgtcgcagacctcacgcgcgggcacctgcacatttacattgtttttcagcagacatgcgtcgcgcagcaaaagctgcaagcgctccatgctttccgggaataagggcttgtccttgatgagcggcgcggtcgccgccaaaaggtcatgctccgtgccggaaacgagtgcgtttgcaatgtcttccgccatttgctccgcttttgcggcgcggccgttttcgccgtccgaaagcattctgccgatgttgccgcggtgcaacgacgcaagcttttcagcttcctccatgggcatgccggtcttgttctgcacgtaaaccgccgcttcgctttcctccggcgggcgcacggtaaaaacctgtgcacgcgagcggattgtcggcagcaaagcatccgcagaaagcaccgtaaagatgaaaagcgcgcctgtcggcggctcttcaatgaccttcaaaagcttattctgggtaatctccggcatgggattttccgcaaaaatgcagtagacgttgatatccgcttcctccggctttttgtatgcgtcgcggatgacttcatcgacggatgcgaccgaaatcgtgttcgatttgccgctgcccgtaacaatgcggatatccgggtgcgagcctgcttttgcgcgaatacacgccgggcatacgccgcagggcgctaaatcgcggttttcgcatgtgcagaccgccgcgcgggccagaatctgcgccaacgtgcgtttgccaagccccgcttcaccctgtaaaagaagagtatgcggcagcctgcggcgcgaaaacgccgccgaaagcgccgttttcagagccgcattccccgcaaaaccttcaaactgcattaaaccttctcaaaacggtctacgttcagcacgaaaatggtagagccgcccacggtgacttccaccgggaaagaggagtacatgcccacatccatggtggaggtactgggcacaacctgcgttctgcggcgggaatgcttcgcgatgataccgatgacttcatcgaccttttcgtcttccacaccggagatgaaggtggtgttgccggccatcaggaagccgccggtggtagcgagctttgtgacggagaagccgcctcttgtcagtgcggaagagaccgcaccgctgtcatcgttgctgacaatcgcaaggatcaatttcatactatttcctccttatcgcgttttttgaaacgcatattcgttgttttttggagatcagcaaagacaggctaaacgaaccgttaaaagcccctctattcatcgcttttctctctatttgtattttaacatcttgtcgaagaaaaatctataccttttttggcttttgggcaatttgttttgcaaaaacctgcggcgttaaagccaaaagcgccgggacgttcaaaagcgccatcaggccgttaaacgcatcacatacatttaaaacgccgagaaacggagacatgcaccccaaaaagcaggaaaacgccgaaaacgccatgtatattctcttttccgccgcgccttttttcggcaataaatacagtagcgcgtccataccgtagcagctccacgccaaaaccgatgcaaacgcgaaaagcgccacgcatacgccggcagaaagctcgccgaaccgccccaaaacgagcgaaaacaccgaaagcgccgcttccggggaaaaatcacgcacgggtgacaccagcatgcacagcgctgtaattgtgcacagcaggattgtgtcgataaacacctgcaaagcgccgagtgtaccgatctgctccggggtcttattttccgtacggaacgtcgcgaatgtaccgctgccaaggcccgcttcgtttgtgaacaccccgcgcgaaatgccctcacgcatggctaaaatcatgccgcatacgccgcccgcaccggctttcagcgaaaacgcacctttcagcatattccgcaccgcgccggggatatggcttccgcgcagaaggagcaccgcggcgcacaacgccaaaaacagccccgccatgaacggcacaagcttttccgtgacgcgcacggctttcggcaggccgccgcgcacgcaaaaaagcaaaagccccgcaaatacaacgcccgcaagcacgcgcggcacacccatgggcaccagcaccgacgatgccgcgccggtctgcgccatggtgcccatgccgagcgccgaaagcacacagcctgcggcataaatttttgcgccgtgccgcccgaacgccttctgcacatagccgatcgcgccgggggcgtttttcgtgccgaattttgccgccaaaacgccctcggcatatacggtcatcatgccgaaaaatgccgcaatccacatccagacgaccgcgcccgcgccgccgaccagaattgccgccgcaacacccagaatattccccgtgccgagcgagccggcaagcgacgccgtcaaggactgaaatgcggaaaatcccccgcagcgctgcgtgccgcacaatgccccgcgcgtcatgcccggcagctttgtcacctgcatgaaccgcccgcgcagcgtgaaccacacgcccgcaagcaaaatcaaaagcagcacgtgcggcccccacaaaaccgttgtcaaaacacggacaaacgccgagaagctctcgttcacagcgcgcagttcatctcaaggtacgcacacactgcgcgggtgagcgcttcggcaatcacggtgatattatttttaatccacgcttcgtcctcggcgttgtcgtggtacgcgatctctacgaggaccgccggtgcgctcgttttcgtgatctccgcaagacgtgtcgtcgccactgtgctcacaaggtcggggtcggggtaaattttccgcagttcatcggcaataagctccgccgcgcgcttgccggaagcgctgtacggataatagtacacatccggcccgcgcagcttccccgccaaatttgacggcccggcgttcgagtgcagcgccaaatgcaaatcgtaattcccggcgttcgattcgcgtattgcctgcccaagcgacgtgttcggcgtgttgcgcacaacgttaatgccgttttgctccagcatgggcaccatgtcgtccgcgatgcggttcatccagtactgctcatcaccctctgtcaaatacttattgtacggctgaatggacgggcttaaatagattgtcggcataagaaccctcctacatcatgctttcaaaatgtgttcaaaaaatgactcgctgttcacacccgagggacgcaggtagcggccgaggtaatataagctttccggggcacgcgtaacggtgctgacacgctcctcacacgaaagcgtaaccttaaacccgaggtttttgatgatctccggctctcccttactcactgcgccgaacggatacgcaaacaggacgggcttactttgcaggttttcttctgctttctgctgaaaaagcgtcacgtcttcggtgagaagcttcgtgtagtcttccagagattccccggaaagctgctttgtgccgagccgcgcaccgtccgagctgtgcaggtcatacgtgtggttcgcaatttccaccacgccggaggactgcatttcgcgcagcatatcccatgtgcagtgcgcatagtacgggcttttgtccggcgtttcggtgtagaggtcggcgtattttccgatgggcgaaagcacaaatttcatgccgtaccgctttgcggtgggataagcgtataagtagttattgtaatacccgtcgtcaaacgtcagcaaaatcggtttttcaggcagcgcggcgccgttttccgtgtagtttatgaggtcttcggataaaattgccgtgtagccgttttccgaaagccacttaaaatcgctttcgagctcctccggcgaaatgacgtatttgccaaggcgcgatgcgtcgtccataacggcgtgatacatgatgaccggcacacgcacgccggggtcctccgccatgaccgttaagatcgcaccgagtgccccgatggtgccgagcgtcagcgctgcggccgccgttctgcgcagccacgcgggcaaaaagcgataaaacgcaccgacgctcggcacacgatgcgaacgcaagctcaaaacgccgtacatacaccttccctcctttgtgccatatatacgcgccaaaagggggttatatgcaaaagccgcgctctgcacagaggataacatccatgcagagcgcggtttttcaaagtttataaagctttataaagccctgtattttatttttcggctttgaccagaagcatcatcgggcggcgcagctcgtcttccatgccggggacatccatcaagccttcgggcggcacggcttcctctacggctttaagcgtaaagccgctgttcagcacgcccattaaaatctgctgcagcgtgtgatgctgtttttttacgatgcagccgaggaaatttgtgacccgctcgcccggcatgaaatactgatcgatcggccagtaaagtatttttccgtcttcgctataaatccaatcctgatcgacacctgccgtaaatgacggatgctcgatattaaaaagcagcgtgccgcccggctttaaggttttataaatcttcctgaaaatggtgtccagatccgcaatataatgcagggcaaggtttgaaatcacgcagtcccatgtgttttcggggtattcatagtcttcgatgccgcaaagacgatatgtgacggctgcgcttctcgtgcgccatgcggctgactccagcattttctcgctcaggtcaatgcccagcaccgctttggcaccctgctcagcggcataacggcagtgccagccgtaaccgcagccgagatccagaacggttttgccctcgagcgccgggaacagcggccgcagctgatgccactctccggcggcctccaggccgtctacgctgcgcgccatttttgcgtattcctcaaagaatgtttcgttgtcaaattcgctttcctttttgtgtttctccattttgcacactccgtttccccaccggtcttttggataattataacacggtttttcatgcggcgcaagattggcgctctgcaaaagccgagcagccgccctgtccggaaaaccgggcaaagaacggctgctcgcttggcttttctattttcaaatcacgggaagctctgcgttttcttccggcatgtcgtcgtatttttcggcggctgccgcttcggtctctttttcttcttccgcagcaggattttcaacggatttttccgtttctgtggaaactttaggctctgcttccgtctctttttcggaaaccagctcttccgccttcggcaggtgcgacgagaagaaagcatacaggtcttcgtagacctgcgcactgttcatctcggtgatgagcgcgtggcggatgcgcgggtaaagcgtcagcttcacatcgtgcccggtcttattcaatttatcaaacacacggcgcacacccttgcccatatcgcccacgggatcgttttcgccggagatgagcaaaatcggcaggtctttcggcacacggcggtaccactggtcggtgttgatggcgtacaaaagcgtgccgaggtcgatatacccctgcaccgtgagcgggaagccgcacagcgggtcgtttacaaagcgatccacttcctcttccttactcgtcacccagtcgtaatttgtgcggttgggcttgaatttcttgttgtacgggcccgtggcaatcttctcgagcgacggaattttcgcccgtgcgccctttgcctttttcagcatattgagatacgtgcgctcggccttccacatggcagtcgaaatgcccgcgctggtacccatgaataccactgccgtgagggagttgccgtaggcggccgcaaattcgcgcgcgatgaacgagcccatgctgtggcccatgagaaaatacggcagctcgggatatttttcgcgcataatgctctgcaaattgcgctgatcctcgacgacattatagaggcctcccttttcgccgaaatgcccgtagagcgcgccggaggtcacgctgcggccatggccgaggtgatcgttgatgacaacgacaaagccgcgctgcgccatgtattcgcaaaacggtttatacaacgcactatgctccgccatgccgtgcgaaatctgcaaaacagccttcggttcgccgtccggctcatacaggcgggtgaaaattttgttatgtgccgtgctggaatcaaatgtaaattcggataccttcatgcagcttaatcctttcggtttgtgatttttatagaaaagtcaattatcaaataattaccgtaaacacgctcagcgtatgcagcacgctgccggctaagacaaacaggtgccacacggcgtgcatgtacggcacttttttgccgaggccgtacagcaccgcgcctacggtgtacgccacgccgcccgcgatgaggcagtttaatcccacacccggcatttttgccgcgaccgtgttaaacgccagtacgacgacccagcccatcatcaggtagcagatcatcgaaacgaccttgaacttctccatatcgacggcgtttaaaataatgcccagcaccgccgcagcccacacggccgcgaacatgacgatgccctgcctgccctcaatgcagcacagcgtgatgggcgtatatgtgcctgcgatgagcagatagattgtgcagtggtcgagcacgcgaaacacctttttcgcgcggttcacgtttaatgcgtggtaaagggtggagaccgtgtagagcaaaatcattgtgccgccgaaaatactgacgctgacgacgttcacaagactcttttcgcagaaccacaataacataacaagcgccgccgcaccgaacagcgcgcccacaccgtgtgacacagcggagaagatctcttcccctaacgaatacagcggcaaagacagccgcatcctgtcttccttatgccaaacctttcttgcaccgtaaccggcgtatgccgtctgcatatccatacgtttcaccctttctccggggacctgccccagttctttattttaaagctgttttttatttttcttttatatagtttttaataccagatatattcatattataatctgcgtgtttcaaaatagcaagggggtatttgtaaattttcttcgcagacgcccccaaaactgtaattttcagtccatttagcgctaaaaagtctattcggttcccttattgcactcccgccgcacacaaaacttatattttctaacaaattttttgctcaacacgattgactttttgtatctgtgatgttaaagttaaatcgccgtcatactatctatgggatcggaaaaccgtgtctgtttccgggctcataccgtaaaaaactgtgtgttcatggcgttcggcagcgggacacaaaataagcggtttttgcggcatacacgctgtgaagggctcgaagctttggcttcgacccgtttttctgtgccgatactaaacacccggcacagtgtgaggtgcgcaaaaaaatgtccataccgtcgggaaaccgcgcgggcaagaagcagcttgaggtgtggccgacttctccttttctgtttagacaaaatgcgcaccggaaaggcaaccggtatattgtgaaaaaggaaaaacgcacgaccattctgcggttttactcctttacaaagggactgcgccacaattttgtgctggcgctgctcaccatggcgatctcggtcttcgccgggtacatgacaccgcagatcatccgcgtgacggtagactccgtcatcaacgactccccgttcaacctcccctcgtttttggcaacacagatcgaaaacatgggcgggcgggatttcttacgtcaaaatctcattctatgcgccttggcgtcgcttttgttcgcggtgctcgcgggcatttccacgtacctttcgcgcatgaatatggcaaagggctgtgagggcaccgtgacgaagatccgcaacacgctgttttcgcacattcagcgcctgccctacgcatggcacaacaaaaaccagaccggcgacatcatccagagatgcacgcaggatgtcgacctcattcacaactttatcaacgaccagatgatggagcttgtgcgcgtggtgtttctcatcgtcgtctcactcgtcctgatgttctccatgaacgcaaagctcgcgcttatcgcctttatttttatcccgatcgtcgtggggtattccatgatcttcttcgtcatcgtgggcgaccgcttccgcattgcggatgaagccgaaggcaagctgaccgccatggtgcaggaaaacctgaccggcgtgcgcgtggtgcgcgcgttcggccgcgagcgttttgaaaaagataaattcaataagcagaacgacctcttctccgacctctgggtacgcctcggccacgtgatgggcgtcaactggggcatcggcgatctgctttccggcatccaggtgttgacgatcatcgccgccggcatcgtgttcgtcgtggacggcgccatcacggagggcgaataccttgcgttcgtcgcgtacaattccatgcttgtgtggcctacacgcagcctcggtcgtcttttgagcgagctttcaaaaaccggcatcagctccaagcgtatttttgaaattctcgacgcggagccggaaaaggatgcggaaacccccgttaccccgcccatggaccgcgacattgtgtttaagcacgtcaacttctcctacggcacttccggcgaagtgctgcacgacattgacctcaaaattcccgcaggcaccacgctcggcattttgggctccacgggcagcggcaaaagcacgctgacctaccttttagaccgcctatatgagctgccggaaggctccggcgagatcaccatcggcggcgtggatatccgcaacatcgcgctttcgcacctgcgcggcaatatcggcattgttttgcaggaaccgttcctgttctcgaaaagctttaaggacaccatttcggacggttccaatcgccacgatattgaaagcgtgcgcaagtatgcccgccttgccgtcattgacgacaccatcgaccgctttgccgaaggctacgatacgcagatcggcgagcgcggcgtgacaatctccggcggtcagaaacagcgcgttgccatcgcccgtatgctcatgcagaacacgccgatcaaaattttcgatgactctctttccgccgtggatatggaaaccgacgcgaagattcgcgaatccatcaacaaaaacgtgcgcggcacaacgattttgatcgcccaccgcatcacgaccatcatgaatgccgaccagatcattgtcatggataagggtcgcatcgtgcagcgcggcacgcacgaaacgctctcgaaggaagacggcatctataaacgcatttacgacacacagcgctcggctacttaagccgcgcacggggtatttaccgatatgaaaatcaaaaacaaatccttacaaacgtgggcaaagctgcttccgttccttgccccgtataagtggcagatgattttaatcatcgcattgatgatcctcggcgcctgttttgacatggtgcagccgcttttttccggctacgccgtggataatttcatcgagccgcgcacgacggaaggcctcattcccttcacggccgtttacctttccatggtcgtcgtgcagaccattacaaccattttaatggcaatctacgccttaaaggttgaaatgtacttaggccgcgacttaaagcgcaagcttttcgaccatttgcagacgctcgacttttcctactacaacacaacgcccgtcggcaccattatggcgcgtttaatgagcgataccggcaagatcggcacggttttggcatggagccttgtggatattttctggagctctatgtacgtgctcggctgcgttgtcatcatgctgttcgtcaactggaagctcgcactcatcctcatcgcgattatcccgatcatcgccgtcatcacggtcgtgttccagaagaaaattttggcagtaaaccgccgcgtgcgcgccatcaatgccgaggtcacccgtcattataacgaaggtatctccggcgcaaaaacatccaaaacgctcgtcatcgaagaaaagaacgacaaagcgttcgaaaaagtcgcggaggacatgcgctccacaacgatccgcgccgtgcggttaaatgccgtgtatattccgatcatcagctttctgaccgccatcggcgttgcgatggtcctgaatcagggcggcaacatggtgctgttcggcgacatcaccgtcggcgaaatgaccgtgttcatcaactatgctttgattattgccgacccggtacagcagcttgcgcgcaccatctcgaattttatttccacacaggtcaacattgagcgtgtctccgcccttttggagcgcgagccgctcatcaaagatacgcctgaagtcattgaaaaatacggcaccgcattcgacccgaaaagagaaaactgggagccgattcagggtcacatcacgtttgacgacgtgacgttccgctacccggacggcgtagaaaacgtcttagaacatttttcgctcgatattcccgccggcaccacggtcgccattgtcggcgaaacgggcgcgggcaaaagcacgctcgtcaaccttgcctgccgcttctttgagcccactgagggccgcatcctcattgacggcaaggattatcgcgagcgctccatgctgtggctgcactccagcatcggctacgtgctgcaaacgccgcacctcttttccggcagcgtgcgcgataatatccgctacggccgcttagacgcgacggacgaggagattgaggccgctgcaaagctcgtcagtgcacatgacgccatcatgcacatggaaaacggctacgacagcgacgtcggcgagggcggcgaccagctgtccaccggcgaaaagcagctcatctcgtttgcaagagccgtgctggccgacccgcgcatcttcgtcttagacgaagccaccgcgtccatcgataccaaaaccgaggagctcattcagcacgccatttcgacgctgcttgaaaaccgaacctcgttcctcattgcgcaccgcctctcgaccatccgccacgccgaccttattttggttgtccgcgcaggcaagattatcgagcagggcacgcacgaagagctgcttaaaaacaaaggctactacgccgatctctacaacaaacagttcgagcaggaaaacgtgaagcatgtgtttggggaataatacggtgtgttcctaaaaccaccgatttttcggaacatgaaaagaccggcgaaaaccacagcgttttcgtcggtcttaatttttttgcgttttaatactttctaaaccgctcataccgctcttttaaaagcgtctcggtgtcttttttgcacagctcgtccgtctgcacggcaagcatctctttcactcggctgaaaagctccgccttcgttttgccggattcactgatgacgcgttccacaacgccaagcttttccatgtcctgcgcggtaagatgcaggcactctgcggcttccttcgctttctttgcatctttccagagaatgctcgcgcagccctccggggaaacgacggaatacacggcgttctccaaaatccacacgcggtccgcaaccgccagcgcaagtgcgccgccgctgccgccttcaccgaccaaaatcgagatgaccggcgttttcagtccgatcatttccacaaggttttcggcaatggcctgtccctgcccgcgctcctctgcgccgatgccgcagaacgcgccggaggtatccacaaagcaaatcaccgggcgatggaatttctctgcctgcttcatcaggcgcagcgcctttcggtaaccctccgggttcggcgaaccgaagttgcggtagaccttatcctttgtgtctgcgcccttttcgatggcgatgaccgtcaccgcgcggccgccgagcgtcgcgatgccgccgatgaccgcggggtcatccgcaaagcggcggtcgccgtgcagctcaatgaaatccgggaaaatattctgaatgaagctgaggccgctcgggcgtcccttgccgcgagcaagctgaaccttttcgtatgccgttgccattatgcttcagcctcctttgtctcacctgcatccgcctgctgtacgcaggcatcctgtttgccctcgttgtgcagacgcaggagccgcgcgatcacttcacgctgccgacttctcggcgtgatgagatcaataaagccgtgctccaaaaggaactccgcacgctggaagccctccggcagctttttgcggatggtctgttcaatgacacgcgcaccggcaaaaccgaccattgcatcaggctccgccatgatgacgtcgccgtccatggcaaagctcgccgtcacgccgcccgttgtgggatcggtcagcacagtgagataaaagagccctgcatcgctgtgcaggcgtaccgcgccgctcgttttcgccatctgcatcaaagacaaaatgccctcctgcattctggcgccgcctgccgccgtaaagccgataacagacagacggtgctctgtggcatactcaaacaaacgcgtgatcttctcgccgacaaccgtgcccatgctgcccatcataaaatgcggatccatgcagaacacggcgcagtcttcgcccattacctttgcggtgccgcagacaacggcttccttttctcgggtcgcaaggcgcgcgcttttcagtttattttcatagttcggaaactccagaatgtcatgactcgtcatgtcggcatcgagctccgtaaatgtatcgtcgtccgccaaaaagctgatgcgctggcgtgccgtcatgcggaaatggtggccgcagcggcagacgttcaggtcgtcccaaagctcggagaccggggtctgcgtgccgcacttcgggcatgtcattgtgatctcgtgctgctcctcctgcgggtttttcagttgttttccgcccttttccagctcattctggggcgagcggaacagacccatcaaattcataacggtctactcccttcggtaaatgaacttcctcagccctcacggtttttgatgaagtccgtataataatctccgctgtggaaaacggggtcgcggataatatcgatctgatcttcaatgttgttcggcaaaccgccgatgacaagctcgcacaaggcggactgcatcttgcgtatcgcttcttctcttgtcgaagaaaacacgatcatcttgccgagcatggaatcgtaaaacggcggcacctcgtagccctgatataagaacgtatcaaagcgcacccacgggccggacggaatgtgcaggaaattcactttgcccacgccgcctgcgttgatgcggcactcgatcgccgcgccgcgcactttaatgtccgcctgcgtgcagtcaagctctacacccgctgcaatgcggatctgccactttacaatgtctttgccggtgacgagctccgaaaccggatgctctacctgaaggcgcgtgttcatttccataaaatagaaattcttgtcgcggtccatcaaaaattccaccgtaccggcgttcacatagcccacggctttcgccgctttcgtcgccgcctcaaacagctcggcgcgtttttcctttgtcacaccgggcgagggggattcttcaatcagcttctggttattgcgctgaatggagcattcgcgctcgccaaggcacaccacgtgcccctgctcgtcacagagcagctgcacttctatgtgttttgccgggtaaatgtatttttccatgtacatgcgaccgtcaccgaacgcctgctgcgcttcgcttgatgccgttttaaacgcctgttccagctcgtcctcggtctttacaagtcgaatgcccttgccgccgccgcctgccgatgcttttaacatgacggggtagccgatctcctttgccgccttttttgcttcgtcgacattttccaaaatgccgctgcccggaataatcggcacgccggacgctttcatcagtctgcgtgcggcgtccttatcgcccatgcggtcgatgagttcgccggacgggcccacaaacgcgatgccgtactttttgcacagcttcgcaaacgaagcattttccgccaagaagccgtagccggggtgaatggcctgcgctttcgacgcaatggccgcgctgatgatgcgctcctgattcaaatagctgtccttcgccgccgcctcgccgatgcagatggcttcatcggccagcgccacgtggatagactccgcgtccgccttggaatacaccgccacggtgcggatgcccatttccttgcaggcacgaataatgcgcaccgcgatttcgccgcggttcgcgataagcagtttcgtaaacatagcctgttcctttccgccgggcttacgccttgacgagcgcaaacgagaactctgccgaaacgcagaccttgccgtttacgcggcccgtaccctttgcaaaatagaacatgccgtgctgacgcacaagctcgcactcggtctccagcgtatcgccgggcttcaccatgccgcgaaacttcaccttatcaaggctcgtaaacaccggggtcatgccctccgatgcaccgtctgcgagcagcacgcaggcgctctgcgccagcatttcgcactgaatcacgcccggcacgatggggttgcccggaaaatggccctgcaaaaaatattcgtcaccgcggatgtggcacttgccgaacgctttgccgtcaatgagctccacttcgtctacgaggagcatcggctcgcggtgcggcaggatctttttgatctcttccttgttcatctaacgtattcctttccacggaaaaatcccggggacgcgcatttttttgacggcgctccgggagcttttcatcttaaataatgcggaacaacggctggtcgtattcgacgacctgcccgttgccgacgcaaatctcggcaatctcgccgtccatttcgctgttgatctcgttcatcagcttcatggcctcaatgatgcagagcgtgtcacccttgtgcaccgtgtcgcccacggcgacgaacggcttgctgtccggagacggcgcggcgtaaaacacgcctacggcagggctttttacataaacgccctctttctccttcacttccgcaatgggctccgtcgtgtgcatctgctccggcacggcgggctgcacggcattcaggatcggcgccgcctgcacgacctgcgcggcgcgctcaatgacgatattttcgccgtttatttccagcttcgtcagctcgttctgcttgacgatctccgccaaagccgcaatgtctttaatattcacaaacgtccctccgttgaatcaagcggtatttatccgggtattcccgcagatgccctgcggtgtcgtaccctatattttactacaaaaccttgcgaattgcaatacaagcgttgtggccgccaaagccgagagaaacggacagggcgagatcaaggtcaacctttctcgcttcgttcgggcagacgtcaaggtcgcagtccgggtccggctctttgtagttgatggtcggcggaacgatgccctctttcaccgccagcgcggaagcaatggcctccaccgcgccggccgcgcccaacatgtggcccgtcatggactttgtagagctgatgacaacgtcatatgcgtgctcgccgaacgcctttttaatggccagcgtctcactgcgctcgttgagcggcgtgctggtgccgtgcgcgttgatgtaaattttctcgtttgcaaggtccgcgcccgcttcttcgtatgccatgcggatggctcttgcgccgccgttgccctccggatccggggcagtcatgtggtgcgcgtcgtccgtagcgccgtaacccacgatctccgcgtacattctcgcgccgcgcgcctttgcgtgctcatattcttcgagaatgagcgccgcgccgccctcgcccatgacaaagccgcttctgcgcttatcaaacgggcagcaagcgtcttccgggtcggggcaggtagtcagcgccgtcatattgccgaagcccgccacgcccacagggacgatggctgcttccgcgccgccggcgatgatggcatcgagatagccatgcttaatggcgcggtacgcttcaccgatctcattgttgctcgtcgcgcacgccgtggtgatcggcaggcaggagccctgcgcgttgaacttaatggcgatgttgccgcccgcgatattcgcaatgagcatcgggataaagtacgcggaaacgcggcgcgggcccttttcgttcagcgccgtcatctgattggagaacgtctggatgccgccgataccggaaccgaaatacacgccgaagcgctccgggtcgatctttcccatgatctcgctgtcattcaccgcctgcgttgccgccgcgatggcaaactgagagaacgggtcgttcttgcgcacttcgcccttatccatgtacagcagcgggtcaaaatccttgacctccgccgccacatgcgctttaaagtccgtggagtcaaacttcgtgattttcgtgatgccgcacttgccggctttcaggttttcccagaacgtatccacatcgttgccgatcggggtaactgcgccgaggcccgtgataactactcttctttccatatttttcaggcttccgaaacggaagcactcctttctcttgaaagttttgaaccgatttatctttttacgttgaaaacttaatcaataagaactttttcaagcccgtaaaatctcaaagttcacaggttttaaatagccaaaccgccgtctaccttcagcacttcgcccgtaatgtacgccgcgctgtcggaagccaaaaacgccactgccgccgcaatatcctccggcttgcccattctgcccagcgggatgctgtttaaaagcggattgttgtcgccgagattttctgtcatgtccgtctggataaagcccggcgccactgcgttgcaggtgatgccgcgggaagcgagttcgcgcgccacggatttcgtcaggccgatgacgcccgcctttgaagcggaataattcgcctgccctgcgttgcccataatgccggaaacagaggaaatattgatgattctgccgcttttcttgcggatgaagccggaatagcacgcgcgaatcatgttgaacgcgcccttcaaattcgtgtcgagcaccgcatcaaaatcctcgtccttcatgcgcagcatcaggccgtcgcgtgtgatgcccgcgttgttgacgagaatatcaatcttgccgaggtcgttcgtcaccgctttcacggtttcgttcaccgcggcggaatccgccacgttgcaccggtatgcttttgcgtttacgccaagcgccgtgatttcgttcacaacagcttcggccttatcggcgctgcctgcgtagatgaccgccacattcgcgccgtcttcggcaaggcgcagcgcaatggcgcggccgatgcctctggatgcgcccgtaacgagcgccgttttgccgtttaagctcatgcgttttctccttctgcacggatcgcctgcaccgctgccgaaagcgtctccgcgtcttccacgttatataccttcaccgcgcggctcgtctttttgatgaggccgcacagcgttttgcctgcgcccacttcaacaaacgtatccacgcccgcctcaatcattttttcaacggtctgctgccagcgcaccgggtgtgcaacctgctgtgtcagcagttcttttgccgttcctctcgtgtacggctccgccgtgtagttcgcgtagaccgacacggtcggctccttcacgtccatcgtctccaaaacgtcgtgcagacgcgcagaagcgctctccataaacggagaatggaagccgccgctcacattcagcggtacggctctgccgccgtttgcggcaacgtcggaaaggaaatccggcaaagtcgttttcagacccgccacgacgagctgacccggacagttgtagtttaccgggaacacgctctgatgcatgcggcacagctcctcaaccttttcgttcggcagcttcaaaaccgccgccatagcactgtctgcctgctcggctgccgcctgcatcgcttcgccgcgctttgtgacgagcgagaagccctcttccgttgtaaagatgcccgcaaacgtcaccgccgccacttcgccgagcgagaagcccgccgtcatgtcgggcgtgatgcccgcttcacgcagcgcttctgccgccgcaaggtcaacgcagaacaggcacggctgcgtgtttttcgtgatgctgatctcctccaaggtgccggaaaagcactggttcttcgtgccggggcggatgctctccgccgtgtcaaacacgttcttcgccgccgcgctgtgctcgtaaagggacttgcccatgccgctgtactgtgcgccctgaccggagaaaacaaaggctactttacccatttggtcgcccccttcagcacgtcttccgcctgcgtgaagatctcttcgatgatctcctttgcggtctgctctttgttcaccatgccggcgatctggcccgcaaggaagcagccggtcttttcgtcgccctccacggccgcacggtacagagagcctctgccgtacgcttcaagctcctcgtcggaaatattgctgtactcaagcttaaaatattcctttgtgtatgggttcttgatgctgcgcaccgggtgaccgagacgcttgccggtagacatcgtcgcaatatcattggcctttaagaccttgtttttgtagttctggtgcacgccgcactcctttgcaaccaggaagcgcgtgccgagctgcacgcccacagcgcccagcatgaatgcagccgccacgccgcggccgtcgccgatgccgcctgccgcgatgaccggaatcgtcactgcgctcgtcacctgcggcacaagcgccatggtggtcgtttcgccgatatggccgccgctttctccgccctccgcaatgaccgcacaggcgcccacgcgctgcatcagacgtgccatgctgacggatgccacgaccgggataaccttaatgccggccgcaagccagtctttcatatatttggagggattacccgcgccggtcgttacgaccgccactttttcctccgcgaccacctttgccacctcgtccgcgaacgggctcatcagcatgatgttcacaccaaagggcttatcggtcagttctcttgcaattttaatctgctcgcgcaggtactctgcgtttgcgttcatagcggaaataatgccaaggccgcccgcttcggaaacggcgcctgctaatttgccgtccgagatccaagccatgccgccctgaaagatcgggtagcgaatgccaagcatgtcacaaatcggtgttgagatcataatgttttcccctttccggcttttgcctgttgaaaacgtttcggtttttctttatttttgactgtatgtcgtgtttttaccagcggatgatcatggcgcctgcagaaaggccgccgccgaatgccgccagaatgatgaggtcgccctcgtgaatcttgcccgcgcggttcatctcatctaagaggatcggcacactcgcggaagacgtgttgccgtagcggtcgatgttgatgcagaacttctccggcgcaatgtcggggattctgcgtcgcgcttcgttgataatgcggtaatttgcctgatgcggaatgacaagcgccacgtcttcgcccgcaacgcccgccgaagccatcagatccttgatgttgtcggacatcgccataacggcgaatttgtacgtctcgcggccgttcatgtgtacggacgtaatctcgctgatctcatttttgtaccatggagaacggtcatagcgcgtcggaattgtgattacgtcgtcgccgccctttgtcatcaggtgagaggccacaaggccgtcgcccttgccgagcaccgccgcgcccgcgccgtcgccgaaaatacagcacgtgccgcggtctgtccagtcgatgataccgctcatgcgctctgcgctgacgacaagcacgcggttatacgcgccgcgggaaaggaagcccgccgccgtttccaacgcaaagaggaagccgctgcaggccgccgcaaggtcaaacgccgggcagtgcgcgccgatgcggttctgcaccatgcatcccgtgcccggagaaagtgtgtcgcccgtgatggtcgttgcaatgatgaggtcgagctcatcggcagagatgcccgcattttccagcgcgcgctcggccgctttcaccgccatatccacattcgtttccgtctcgctgatgtggcgggaacgcacgccgatgcgctgtgtgatccattcatcgttggtgtctacaagcgcagagaggtcgtcgttcgtcacaacgtgttccggcgcgtagctgcctgtacctaaaattttaaagctcatagttttctttcctttccggccgaaaaaatttcggcagcgccgtaaaggcaatataataaccttgttaaagtgaatatttgttaaaagtctttgattaaactttcttcgagaaagtcaagaggggagagtttatcgtccggtggacgatgaactccggggaaccctatcaaggggttcccaatgatttgccgcgcaaatcattgaaagaaatttaaagaaatcacaatttcgtctgaaaataagaattgatgcgcgtcatggtgcgcagaagctcctcgcgctcctcttccgaaagatcctcgcagatctccgcaatgatgcgccggtggcagcggcggtggaacgcctccacttttttgccctcgggcgtcagcattacctgcaccgcgcggccatcgccgggcaggcgctgcttttcgcagtagcccttctgcaccagcttgttcaccgccaccgtaacggagggctttgtcaccttgagttgctgggcgatctcgctgaccgtcatgccggttttgcctttggcaatgagctcgatcatgtgcatctcgttgatggagatgttcagccgttgttttttcagttcgttctgctccaagatctgcacattgcgatagatctccaccagaagctcgtttgctttcgcagaaaagccggacatgctgcacactcctttcgcccatttgtgccgtttttcgataaatttagttaaacaaactaacgaacaaccgctgatattgtactcgtttcgcggcaaaatgtcaagtaaaacgctttcgcgcatcctctttttcctttgaagtgccctccttttccccgtaaagttatctcgaagctgataccgacttgggctcccttgtaagaattctgaaataaatctgttcttttttcgtagcaatttacattttaattcttttatggaattaaaaatcggaaattatcatgtagaatagtcccgtatataaaaggggttcgtatgcccttttatgaaatcgaaatttattgctgaaaggaagtttttccgttgaagctgttttctaaaaataggaagcgcatcactgcagccgtgctttccgctctgctgctctgtgccgcaccgctcagctacgccgacgataccgtagccgatatggaagccaagcagaccgagctcgccaacaaaaaggccgacctcgaaaacaaaatctcctctctggagtctcaggaggccgataagaccgaataccttaccctgctctccgaaaagattgataccatcaaggagcagatcgataccgcaaacagtgacatcaccgtgctgaacaccagcattaaaaagctcgaaaaagagctcaacgactccgcagatcagatctccgataccatggagcttctgaaaaagcgtctcgccgtgctgtactccgccggctgcaccgtcggcacactggagattctcttcaattccgaaagcctgcatgatttctccatgcgcgcagaggccgtctccaccatcacccgccacgataagcagctcatcgatacggttgcagcgtacatgaacgagacgaaggcacagcgcgaagagcttgaaaaggaaaagaccgcgctcgccgatgccaaaaagctgtatgaatcaagcgaagaggagttaaagcagctcgaaagcgacaacaccgccctgctcgagcagattcgctccgataagagcagtgccgagaccgagctttcccgtaccgaggaagaagaatacgtgctcgcaaacatgatggcggcaaagatcgccgaaatgcagcagcagatggcacaggcaaaagccacgcccaccccgaccccggtaccgaccgtagagcctacacctacgccgacccccgtgcctgaagaagaagtggacgataacggcaacgttatgcctaccccgacaccgaccccggtgccgaccgtaaagccgacccccaccccgaccccggtgccgcagccgtcttatgacgatgactattccggtgaaagctttgcatggcctgttccgggctggaccggcgtcagctgtgcattcggcaacggccactacggcatggatatccccgcaagccgcggcacgcagatcgtggcatcccgctccggtagggtcatgaccgcaaacggctccgatgattggggctattcctggggctactacgtctccatttaccacgacagcacctattccaccctgtacgcacacatgagctccgtcgccgtcagcgagggccagtgggtcaacaagggcgatgtcatcggctatgtcggcgataccggctattccttcggtgaccactgccactttgaggtctaccaaaacggcacccgtgtagacccgtcccagttcgtataattttcatcaataaatcaagcgccgagttttcatggaagcccggcgcttttgttttctctataatttctgccaaaacggacaaaagtatttttatgtccgccttttctccttctcctgtttttacaaaatccgacttttgagctgctgcgcgagatgattgcgaaggtcggcggctttcctttttataaacatcctaagacacttcaccgcccaaagggcagtttcacaaatccccaagggatttatcctgttgaaaaaaggactttgcaaaacgcaaagtccttttttctgtctatgggctacaaaaaagatatttttgccgttttcgcgtatgaattcgaaccctcacacgctttatcattctataccgctctttaactgggcataaatttggtctatctccggatgttcttgtcttatttttatttgaaattctttccattcttgaatttcttctgccgttgcttttctataggttgtctctaatttcataaaatgatatttgttaagctgttgctcaaggcctacaaactcagttaaccccttataaaaattaacatacttttgggctacgggctgtccgtcaacatataactccggccctggcatcacttttaatatgatttctaggaaattactacttctaatctgatttataattgttacaaattctgtcggaatcttatttcctcttaaaatatcatcgataccgtgaatacattcttcaatttttttgccatatgatactatagattttttggcttcaaagtgttctacatgttcaccatcatcttttccatttctcacactctttatcattaaaaaatcattattactattgaaataaaagccatcaatagttttaattccttcgtttgttgctgtttgtatattgaaaatcccggttgcgtatttaaagtaagaattcactttatccatgtacatgtacaatggataaagatatttttccaaaaggtgaagcgtgttgttttcttctctaattaatgggatataatcgacgatcaaataaaatattagagatgcaatataggctaaactaagattatccgctattctaattatttcatatatcaaagtgttttcttctggcctttgaaatatcatattaagtccgtcaaatataggtggtgcggaagaaaatttacaaataaaaaataacgacactaccaacagcaaaatatgccatttcaaatctttaaaataattacgtctcataacacattcttatttcctttattttgataattcatatgaattgttttccagcccttatgatttgagcctcttaaaagactggatgctctgggactccatatatatccacatatccggcatttagcttggataggattgtgccttccggtatatgttccaataacctctatattcggatttgctttccgcacttgttcttcaaattcatcttgttcttttacgaattttttgtgtgctaattttgtcccgcactttctgcatccatctcctgcaagcatatttgcgggaacgccatcccattcgaattcgcagacagtacattttacgagtggccttttatttgcatttacatactttcccaacacctcaattgtgggatgtactgcactcatagactcaataaaatcctcatgagtctttgcttttgcattatcatatgactgcctctcaatggtagaccattgtgaatcgcttaatccgtattgtatattagtaatgtcgaaaagcctctttactaaatctttaataacactatgatctgctttattcaaatcatcattgaagacaaaacagtcattttcgaaaggaatctgttcagttaacggaaatttatcgtatatcgttattaggtcgattgtaaaatgaagttggacacctgaaaaaaaggaatccatagtgacttccaatgtggtagaatgaagttccccaacaccattcaccagaggtaatcactatggatcacactcagtataccacaaatggagcagaacgcaagcccggaacgcatttaaccatggaagatcgtggagcgattcaggctatgaagaaactgggac

SEQ ID NO: 22 - DNA, 201146 bp, Intestinicoccus colisanans
  misc_difference 1498..1521: note = n is a, c, g, or t
  misc_difference 1817: note = n is a, c, g, or t
  source 1..201146: mol_type = genomic DNA
aggctgttaagcaggaaatcggcgtatatatcgccgaacagttgaaactggaactgtcggaagaaaagacgctggtcactaaagcaacagaccgtgcaaaattcttgggatttgacatcagggtcacaccgcagagcaatcacaccaaaaagacaaaaagcggttccacagcccgaaactacagcggccatgtaatgctggaagttccgacttctgtcattcaaaaaaagctgctggaactgggagccatgagaattgatgttcgcaatggaacagagatttggcaacccacgtatcgtggaaaacttgtcggacgaacagacctgagtatcctagaccagtacaatggtgaggtgcggggattctgtaattattatgcgattgcaaacaatcgctctaagctgcacaagttccgctatatcatggagtacagtttctataaaaccttggcctgtaaataccgtacaaccaaaggcaaaattattgctcaatatcgtattgtcaaggacatcggggtaaaattccaggacaagcatggaaatgagcgcatccgactactgtggaaggacagtcttgcaagagacccctatccgctgggaaaagaagcagatattatccataagccgaaaggcatcctgaaaaagcccagtctcggcgcacgattaaaagcaaatcggtgtgaatggtgcggaaaagaaacttcagcgttggtaatgcaccaagttagaacgctgaaagagctggatgaaagccaaccgtgggcagttttcatgaagaggattaaccgaaaaactttggtggtctgtgaaagttgtcacacgaaaattcacggtgcaggctgtgaatgaatagagagccggatacagcgagagttgtaagtccggttcgggggcgagtgcctggaaacctaccgcagcaatgcggcaaggcgctgggtacttagcctacggaattccgtatcacttaaagacggaaagaaataccgcagcaatcataggagctacatcacgcaggtacggcggatctcagatgaactctgtaaacaacatgggctttcaattatcagcaccgagaaatcggaacgggtggctcgtccctatgcgcagtggctggccgagcagaagggaaccgctacttggaaaacacccatccagcaggatgtcgatgcggcaatcgcttcagcattgacatggaagcagtttcttcgggcgctggagcagcagggctatacttttcgtttcgaccgtaagtacaccactttgaagctaccaggcgatggccgtaccgtccgttttaagaccttgggaaagcagtacaccccggaggccatacagcgccgcatcctttacccaaagcctcttcacaggactggaaaagaatcaccagcaaaccgcggattcctgctcctgcttgggaaaaagtcttcccgcaggctcaccggcctacaggcgctttacttttcctatctatacaagatgagcgtacttccgaaaaaaannnnnnnnnnnnnnnnnnnnnnnncttcacaggactggaaaagaatcaccagcaaaccgcggattcctgctcctgcttgggaaaaagtcttcccgcaggctcaccggcctacaggcgctttacttttcctatctatacaagatgagcgtacttccgaaaaaaaccgataccccagctacgctgtgcgggaggatatccgcaggctggatcagcggatcgagcaggcggagttcattttcaaaaatgaaatagaggacagaggtcagcttgcagccattcggcagaaagccgagaatgaaatcgctgtcctcataaaacancttcacaggactggaaaagaatcaccagcaaaccgcggattcctgctcctgcttgggaaaaagtcttcccgcaggctcaccggcctacaggcgctttacttttcctatctatacaagatgagcgtacttccgaaaaaaaaccgataccccagctacgctgtgcgggaggatatccgcaggctggatcagcggatcgagcaggcggagttcattttcaaaaatgaaatagaggacagaggtcagcttgcagccattcggcagaaagccgagaatgaaatcgctgtcctcataaaacagcgtcagaagctctaccgctgtaaatcggagtcctctcagatcgaaactctgacagagcaactgaaaaagctgcggcataccgtaaaactctgcagaaacattgaaagccattccgtccagatggagcagcgcctgctggcggccaagctggaagaacaggaacaaaaggagcaacagcaaaaagaatcccgaaatcgggagaaacaaaaacgttcccataattcggagcgatgaaagaaaggtgaattgactgaactacggaagcgatccagccgaccagattgttcggtttacacttgaaggcacagaaatggcgctcaggctgtcgggtatggcggcgaaaaactttgcgctgtttgtctatgccgtactgaaggaccagaagaaaacccacggcaagacgaggcttgtgcgcatgcttcgggaacagcgtccattcaaattctttaacattcccacggaacatatgagggagttcgccacagaagccaaaacgcacggcctgctatacgtccccattcggaataagcaaaaggccgaccgtatcgaagtggtggtattcgcggacgacgcctccaaagtccagcgtatttttgacaacctcggtcttgacgcagttaaggcgcaggtcggcgaagccaccatcgccagtgtacaggagcaggaaaaacaggctcccgcagccccggcccccggcaagacggaaaccgtcaaaaccgagcagggcgaagtggaattcgaggtgggcggctttgaggacgatttcaatatcggcccgcctcagcaggatgccgccgaaaattttacttctggccgggagaaggaatcaaatcccccggcagcggaaaagagtccgtccgagccttcctcgcccagcaaaagctcttcgtccggcttaacaagccctaaagagccggagcataagccctcggtgaaaaagcagctgcaggaaatccggcaggagcaggcggagaagaaaacagggaaatccaagcagcaggaacaccagaatcctacccccggtcgttccaagcagaagaaaaaggaaaaacagaaaggaaggtaatgccctatcgatttatccagtttgattggcagaaagcaggaagtcctgcctcagccggaacagcagtacaccaaggaagaatatgccgctatgaagcaggctgaacgtgaggaagtctggtcgagagttagcgcacaggccgagtcagtgttcaaggatgacgattccttgaggggattcctccatttcatggcggactgcaccccgcagaaaaccagcaatctgctgcttctctatgcgcagaatcctgaaatcacccatccccgcaccttcgacaaatggaaggaagccgggcgctccatccgttccggtgagaaaggatataccttctatgcggatcaggaatataccaaagaggatggaaccagagggatcggctccaccatcaccaaagcctacgacatcgctcagaccagagggccgcagcccctgccgcctcagcagcatctgcccgaagaggttatcgccgcaatgatagaaaacagtccggtcccgctggtgatttccgaccagcttcctcaaggggtgcaggcgcagtatgtgccgagacagcgcaccatttttgtccgcaatgggatggatgaaaccgccaccatctgcgccatcgcccgcgagcaggcccacgccgacttcgacgcggtgggcagtggttactatcggcaggcgtatgcggctcaggcttactgcgcagcgtatgtggttgcgcagaaattcggccttgatacctctgcgttccattttgacaaggtgtgccaaagctatacggaaatgagcgcggacgataagcgcggctttttgggcgacgttaaacgggccgcctattccatcaactgggatatccagaggaccttccgggatctggagcaggccatccagccggatgaattttccgtcgcagcgcccaagcctgccaaggcgccgaaagcaaaaacagagaacgcgccggatcgatgaacgttttccgtttgttttcttttgtgcagtagcttttcgcaggctgttgtgctatattaaagtaaaataagattaaatgccggaaggaagggaatcgccatgacaaggcagcggttggtgaaaatgacctacggggaccggaacatactggtcaaagcacttcaaagcgcgcggggatctatcggcctggaagtgttcgaaaaactgcaggcacttatgaacaaaaccctcgctgctccaaagcgcaagctgtacctgagcgacgaagaacaccagtacgccacgctgtctctgaacgggatgcgaaacgcctatcttgcggctgatcgaagctgcggcggcattgaccgtcttctcataaagctcatccgcgcgaaataccggcgtgtacctgaacgatataaagtgtaacaacgatctttgcccggagtctttggggtttttctcccgtcgactccgggatttttttgttttattgaaaaaggaggggagtaaccgacaagaccgtctgcattgttttatctttctgctgtgaagaaagggtgggtgcctcttcagcgggatagctacagaaaaaaattcctggtgggtatggctcctgcctttgcccatcgtctggagggccgccctgttggtcgccggaagctggcgcgacgggatgaaccttgtggatctgctggaaaagctctctgcctccatgaacagtcccttttctgttcactggacgaaatactccgcccgctgcctgctgttcttcacgctgggatatgcggttgtcgcccttgccgcaaccgccaaccgcaagcattaccgcaggggtgcggagcacggttccgccaggtggggcaacgtgtgcaggatcgccaagcggtaccgggacaagaaaaatcctaaacaaaacctcattttgacccagcatttccagatggggatggacggccacaagcacaaacgcaacaccaacgtgttggtcatcggcggatccggcgcgggcaaaagccgctcctacgccattcccaatgtgctcaactgcgggacgtgttcgctggtcgtctgcgatccaaaatccgaaatcctgcgcaaaacaggcggagcgctgaaatccaacggctatgaggtgcgggtgtttgacttgttaacccccgacgcctccttctgctacaatccattagcctatgtgcgggacgacaaggacgtgctgcgcctaatcgaaaccctcattcagtccaccaccccgcccggggcgcagagttcggatcccttctggaccaaatcggaaacggcgcttctgcaggccttggtcctatacctcatgcatgaagcgccgccggaagaacagaacttagccacggtgatggagatgctggccgccgcggaagtacgggaggaagatgaggaatacgagtctcctctggacgtcctgttcgcccgtttagagatgcgggatccggagagtatcgctgtcaagcagtaccacatctttaagatgggcgccggtgatatatgctctaagtgacttcttaatcatgattttgtcatggttagtgaagcaatcacttagagcatttttgtttcaggaggtacagctatgagaaacgaaaaaatcaccccactgtacgagcgcctgagccgggacgatgagttacagggcgagagcaattccatatccaaccaaaaacagatgttggaggattttgctcgccggaacgggctgccaaatcctacgcattttacagatgacggtatctcaggcacccggtttgaccgccccggatttttggcgatgatggaggaagtggaggcagggcgtgtagaggcaatcgtcatcaaggacatgagccggttggggcgcgactatttaaaggtcggtcaagttatggaggttttgcggcagcgaggcgttcgtctgattgccatcaacgacggtgtagacagtctgaaaggcgatgacgattttaccccgttccgcaacatcatgaatgaattttacgcccgtgataccagccggaaaatccgctctgtgtttaagtcaaaaggcatgagtggtaagcacctgacaggcaccgtgatttacggctacttatgggacgaaaagcgggagcattggctggtagatgaagaagccgccgaagtggtacgccgtatcttttccctcacgctggagggatatgggccttatcagattgcttgcaaactatccgcagaccggattgaaattcctgtcgtacaccttgcccgcttcaacgagggtgtgaaccgttcaaagccggtcaaagacccctatggatggggatcatctaccatcgtgaacattttgaaaaaacgagagtatttagggcataccatcaatttcaagacccgcaagcactttaaggacaagaaaagtcactatgtttctgaggatgaatggacgatctttgagaatacccatgaagccattatcgaccagcagacctttgatttggcgcagaaaatccgcagcaatgtacggcgttatccaaacggctggggcgaagcggctcccctcacaggtttgctctattgtgccgattgtggcggcaagatgtatgtccaccgcaccaacaatggcaggcggatttctcaatatacctgttccaattataccaaagttccgtgtgggacactatgccctacacaacaccgtatcaatgagagtgctgttctgacattggtttctgacacgctccgggctatcgctgaatattccaaaaatgaccggacggaatttattcacaccgttcaggaaacgcaggttgctcaacagagtgccgatatatcgaaaaagcgcaggcgtttggctgctgcccaaaagagagccggagaactggaaaaactgatttgcaaaatctatgaggacaacgccctcggcaagctgccggatgcacgatataaggcgcttgatgcacagtatgccaaagagcaggatgcacttgagattgaaattgcagagctggaaaaggctgttaccggctatgagcagagccagaaatcagcggagaaatttatagccctgattgataagtacgagaattttgacacgctgacaaacaccatgctcaacgagtttgtagagaaaatccttgtccacgaacgcgcccgaaaaggcagccaggacaccacgcaggaaattgaaatctacttcaattttttagggcgctatatcccaccatccttacagccggttcctttaaccccggaggaacaggaagaactgcggaaaaaagaagaacgcaaggacaggcttcatcagaattatttgaagcggaaagccagcggcgcacagaaacggtatgaggacaaaatcaaggcgaagaaaaaagcggaaatggacgctaagaaagccatgatccgggctgaggatatgaaaaaaggtgttttttctactatcgggcagctaccaaaagaagaaccgcgcaaaggcagcatagcagccagcgcagcagtctaatcatcacggagcaaaggagcatgaatatgagtaagttgacttacattcgttgtggagattatgatatacccaacctaaaactttctgaacagccggaaacttttattggcaagtacggcaggatgcgaaaatcctacctgaaggaacatcaccccattctctacaaccaactactgatgagcgagaagctgtatccgcacctgatagagattgaccggacagcgcgggagcgtatggacgccatgttacctcacatgatggaggttgcgggtgtcacggaagaactgaaagcctgtgatcctatgcgttgggtggggctgatgaacacattaacggcacagattgaggaaattttaatcagggaactgatttgcagatgaatgggaggtgcgggaaatgctgacctttgaaaaggttttgaaagtgtttcaggcatatctggatgatgaccctctgtatgaggtggttcagaccagtcatggttatacattgatggcatgggaaccccaccggaatgactggtacagcgcagaaatacagaaaaccccggaggatttacagaacgctttgttgggtacatacgccaactttctggaagataagattactggaaatgaccgtgacctgactgtgacagaaaccggagaaatccagcagaggtgtcgggaacttttggaaaagtgccgggaaccttgatatagaaatgccagaaggaggccgcgattatgcgtcctccttctgcttcgcagtctgttccattttgagcgccccgtctatggcaccttcgataatcggcaggtattcttcagggcaaagcttcagcttgtggctgacccgttgccgctgttcgctttcttctcgcataatctccgggttaaaataccgttccacgggaagtccgcagaccttaatcaactggatcatcacaggcaggctcggaatcgcaccttgattctcaatgttggcaagataccgccattcaatcccaaccatttctgccaatgtttttcgtgccagacgctttgcctctcgtgcagctttgacatctgcgccgaaggtttcaaaaccgggacaatcttcaactttcgccatataacatcacccagttacattgtataattcatacttcacccgtggaatgttgctatatgcatgttggttgaagtttataattcatatcccgtttcttgcattgttcgaaaaagagaactataatgtactctgtggaggtgcgaaatggactatatgacattgaaagaggccgccgaaaagtggggcgtgacacctcgtagtgcaaattattattgcgctggtgggcgtatctccggcgctgtgaatatggctggtgtttggctgatcccaaaggacgcggaaaagccgactgatagacgcagaaaggagtttcaacatgaataatgttttaattatcgaagatgataaagaaatttgcgttatgataaaagaccatctggaaaagtacaattatcaagtcttcttcacacttactggtgcaaatgcgattgaacgtataaaagaattatccccggatttaattattttagatttaatgcttccttttatcagtggagatgagttaattagaaatatcagaaaattttcagacgtacctgtaattgttgtttctgcaaaaagtttaacattcaacaaagtcgaactgctacgcttgggtgctgatgactatttaacaaagccgtttgatttggacgaattactagcgcgaattgaacgcaatttgctaagaagtcaaaaagatactcccaatctttgtttgacctttggagaactttccattaatacatcttcaaaaatagttactgttgcagacgaaattattgtgcttacagcaaaagagtatcaacttgtagaactactggcgaaatatcctgataaagttttttctaagcaaaatctttatgaaagtatttggcaagaaccatttgcaagggataatgatgtcattaacacacatataagtaacttacgaaaaaaattaaagggcgaaggctgccgaattaagaccatatggggcttgggttaccgatttgcaaagtgagctttagataatctttagctttacctttagattattcaaggaattgtctgcgatactaaataacaagaaaggagctgtgaaaatatgaacgtaacagtttttgaagctatcaacatcacaaaaaagtatcgcaatacactagccctaaatcaagtatctatgtctgtaatgcaaggagatatttatgggtttatcggagaaaacggtgccggtaaaacaacaatgattcgtttactaaccggactggcggaacctactactggcaaaattgctttattcggtgaaagcaataagaaacttgcaaagcagcgtgagcgcattggctgtattattgagagcccttctctttatcttgatatgacagcctatgaaaatttggaggtacaacgtttgcaacgcggtattccaggaaaaggttgcattgataatgctttagcattagttggtttgaaagataccggaaagaaaaaagcaaaagatttctctttgggtatgcggcagagactagctctcgcaatcgctttgcttgggaatcctgaatttctcgtactagatgaaccaattaacggactagaccctactggaattatcgaattaagaaacttactcaaaagactaaataaagaacgtggaatcactattttgatttcaagtcacattctcacggaacttcatcaattagcaaatagatatggtatcttacatgaggggaaacttttacaggaaattaccgctacagagttagacaaacgctgcaaaaagcatttgttgttgcaagtgaatgatgtagctgctgctagtgttttattggaaagcaaactgaatacttcaaattttactgttatgccagacaaaagtattcatctatatgattatgttgaaaatgccggaaaagtatcagcgttgctaagtgcaaataacattacgatttatcagttagcacaatctggagatagtcttgaaacttattacactaatttgataggagggtgccaaaatgattaaccattttaaagctgaattttataaattgcgtcactcaaagatattgataactatattaggcgtatgtgcggcggttataatggtctcttttgcacttggtgacatgactttttttggagccggagatggaacagaaagtgtaatcggatttcaagctaagtgttatctatctagtgaaataccaacgtttcaaactgttgcccgctcatctcttgcatatacagcctttttctggattattggcattttatttgcaaccatattttttacaaaagaatataatacgggtacaatcaaattatctgttgcatacggcactaaacgaactattctctactacaccaaagtgattacaatattggtggtgtctctgatagcgtatctgatttttgtagctacatttttcgttattgaaatcatacaatccggttacattccaactgcgagtgaagtaataaaccttttgggatgggctcttgcttgcggaacggttttattagcattagaaagcatttctatttttttatgtgtcgttattcaaaatacagggattgtaacagggatttgctgcttatatgtattcagtggagcgtctgtttacttaatgctatggagtgatatggagacggtttcaatacccttaaaattttttgtatatggaaatcctatgtactattggatgaattttagctcttgtcgcacaatgggtattattgagcatttaccattctatttcatagggtgcatttctcttttgattgttggcggtcttattatgattagaaaagaaatcaagtaaacgggaggtagaatatgggttgggcgattatgtttcttgttctgatagcattggtcattatcctttcaatttctttaattaactggaaaatacagatatataaagtaatcgtccaactaaatgctattctgaatagaaaaacgaaaaagttagttacagtgtctttatctgataggcggttagagcatttggttgaaatcataaatcagattgtatcaaaagataatatttatctgggcgaaattcaaaaaaaggagaatgaattaaaagagaatatttcttgcctttctcatgatttacggacaccactaacttccattcgcggatatttgcaacttctatcaagtgcgcctgatgaaaaaagagcggaatatatttcagcattatccggaaaagcattgagattagaacgtctcatagatgacttttatcaaatctctcttttagaagcaggacaatatccattttactatgaaaaggttgagctatgctcattgcttactgaaatcctgctagacaattattcgattttcagcgttaatggaattgaaccccaaatagaaatacctaatatggacatctatcttaatgctgacagaaaggcgtgtattcgcattatacaaaatcttatattcaatgcggtaacatccactacaaataatgttgtaattcaactaattaatattgcagattctgtacaactctgtattaaaaatcctgttgcatctattcctacagaagaatattcaaaactgttggaacgcttttatgtagcagatgtttcaagaagtaatggtacgtctggacaaggactttacattgtgaaaaagctattacttatgatgaattgtacaaatccaataattgaaatacatgaccataattttatgattacgattgatttttcgcccttactcataaaaaaataatctgccggacgacggcaaaagaaaaaaagccgtcgtaaagcagatctattaacgcgcctatgctatcttccggcggctttgaaaaaacagagccgccgtttctttttgcgaaaagcagaaacccgacgacctaacaccgtgtaaatccacggcggcatataggaggattgccgccgtgtctatgcttgccttttttcacagtacccatgacctgcaccagctaaaaaaagtctgttcccagcagcggagcaatgcggtcagaagtatgcactataccatgtaactaaacagcaaaatatactctattacgctcgtatggctttatgccgtccgggcgcttttttgtccctgtggagccggaacatcgggtcagcatggctcgaactttatccccggtgccgctccccgccgccccattcagatttacccaaaaaatctgaatggaggaaaggcagatggaagttaccatcaattataacggacaagctgtggccgtggaggttacgctggaagtctatgaatttcttgaccgggccgatcataaaacggagaacctgttccatgaacagcggcggcattgggatggccgggagtttgacgagtacatcattaccaccgagggcgtagggggctacggcgaaacgccggaggaatacctttgccgcatggaaacgctgcatgagctgatggctgttctggacacctgtaccgaggcccagcgccgccggttcctgctctatgcgcttgacgggctgagccttgcagagatcggtgtgctgtgcggctgctccaaagtggctgtttatcaaagtgtggaagcggtcagaaaaaaatttataaatttctttgagaacaggcttaacgaatgacctgttttctggctaccaagtgaaagggatcatttcccttatctcagcgaggggcggacagcggacgagctgcccgcctctccaattttcaggaggtaagcctatgaaaacaatcaatctgcggtggatgtatccccactaccggcatgacgagtttgtggatgttacggacaaggtatgggcagcgatgtatcaggcccagcgggagatggagaactatgagcgtcggaaagtctaccaccgcgcctactactctctggacgcatacagctggctggaaaattacgcactggaacacagcagatcgccggaagatattttgctggaacgagaagaaatgaccacccgcctgcacctgattgcagctctgcctgcggctctggctcatgccactccgacacaggcccgccgtgttcacgcctactacattgccggtatcaagcagccggaaatcgcccggagagagggtatccatagcagtaaggtcagcgttgccatccaccgggggctgcggaatatgcgccgctgctatgatgacctttttcaaacagagtgagggcgtgcctatgcagaccatcaatctcaaacaatattatccattttgcaaagaggacatttttgtggaggtgtccgatgagatcgtcgaagcgtttcttctggacaagagagccgaggccgccagagatcgcaagatgttccggtataaggcgttttattccctcgattgtaacgatggaatcgaaaatgccgccatcggctgggcgcagccatcgccggaggactacctgatagaaaaagaagaattagccgaatacgaagaactgatacggcgattgtatgaagccatttcctccctgccgcctatgcaggctcgccgtgttcacgcccgctatatgctgggtatgaaagtgaaagatattgccgcaatggagggtatcacgccatcacaggcgggaaaatccatccacgctgcactgcggaggctgcgccggtactttgctcgacagaaatggacggtcaatctatgagtatttccaaagaaaagaggtgcctgacatgaacgaaaaaattacagcccacccccaaaaagaagaacgggagaaagtcctgaaggagattcggcagcttgaaaaccgaaagaagattttggagaacaagcagcggaacgaagaacgcagggttcgcacccgccgcctgattgagcgaggagccgttttggaggggattttcccgctggctcccgacctttccagcgcggaggtcaaagcatttctgattgccctgtcccatcttccgggggctgcggaattgactgcaaacctgccaaaatccggggacacgccataagtcccttgtttacaagggcgcacttatacaccgttgccggtgtcgtgcgccctgccgggggctgttgcgtacttcgtccgcgatggggcgctacactccccaaaccccttgtgcgccccgcgcagccaaacacacgcttcgcgtttgttcggctccacggagcctgaaatatccccgccgaaaggaggtgccacccatagatttctgtcatatccccgtcagtattatcaagcgcagcgcaggccgttctgctgttgccgcagctgcttaccgcagcggaaccaagctgacaaatgaatgggacggcatgacccacgactacacccggaaaggcggcattgttcatgcggagatcatgctgcctgcccacgcgccgccggaatttgcagaccgatctatcctctggaacagcgtggagcaaatcgagaaagcaagggacagccagcttgcccgcgagattgaagcagccctgccccgtgaactgtccggcgaacagcagcttgcccttgtgcgcgcctatgtgaaggacaactttgtagacaaaggaatgtgtgccgactttgctatccatgacaagggaactggcaatcctcatgtccatatcatgctgacgctccggcctttgaaagaaaatggacagtggggcgcaaagtgccgcaaggcatacgatctggacgagaatggacagcgtatcccggatgggaaaggcggttggaaaaatcacagagaggatacgaccgactggaacgataaagaaaatgtggagatttggcgggcagcgtgggcggcctacaccaatcgggcgttggaatctgccggcagaccggagcgcattgaccatcgcagctacaagcggcagggcattgataagattccctctgtccatctggggccagccgccagccaaatggaaaagcgcggcatccgcaccgacaagggcgaagtaaaccggcagatcgttgccgacaacaagctgctgaaagaaatcaaagcccgcattacccgtctttatctctggtcgaaagacgaagcggaaaaaccacaaacgcagcaaagcagcttgaccgccttgtgggaagcccagcagcagttgaacgctccccgcacccgcaccggcaaaatccgggctttgcaggaaagcgctgcactattcagctttttacaggcaaacggcatccagtctatgcagcagcttcatgaaaaaatcgctgatatgaacagccgttactatgacctgcggggaaagatcgtcaaggccgagcgccggatcactacccttaccgagcgcggggagatgtggaaacagtacaaccagtacaagtccatccacaagcagtttgccaaagtaaagccggaaaaacgggaacagtttgaacagcgccacagccgggaactgattctgtatgacgcagcggcccggtatctgaaagaactgaaagacagcggcgaggcaatcaccccaaaggcatggcagctggaaattgaccagctggccgctggaaagcagacggacacgcttgccatgaaagccatgcgggaggatttgaaagcagtggaacggctccgcaaaaccgccgagcagttgtcccgacaggaactggacaaacctcacgaccgggaaccggagcggtaagggctaccgcgttttggcgtactccttttaggtgcgtcgcgtttcacgacacccttttgcacacagaaaaaccgccgtacaggtttccccatacggcggcagtcggtttatttgccgaacaagtcgctgtgtgtgccggtgcgggccagcgtcagcaccagaacatcatcttctatgcggtagacaagcagccagtccgggagaatatgacattcccgatggcctgcccaatcgccggacaggtcatggtcacggttcttatccggcagcggttcgcccatcgccagcaacgctacgacctgctccagcagctcgatcttcaagccacgcttgatggctcgtttgtagtcttttttgaaactggtcgtgtacttgacggtatatttggtttctttcatcttttcaggtcagcaaacaactcgtcaaggtcattgtagccctttacagacgggtcttttgcaatcctttccgcttccagcatggcagcaaccgtttctttgttcggctgttccagccttacttcaaagggaatgccgccttcacgaagcgactggcgcacaaagatgttaaacgccgtagtcaggttcatgccaagttcagtaaacagtgcgtccgcctgcgctttcaaatctgcgtccatgcggatactgatgtttgtggtatttccagccatacgatcaacccctttctgctggcaattatagtatatgctatttgcacgaagaaaacaatactttgcacgaatatttaataataaattcatttgaggaggttgccggctttatgaaagaaatcatttatgaagaacaataagtctgaacctatccccgtcatggattaccgccagtaccgcagagtgcggaggctggtgcatgagtgctgtaactacatcgacggaaactgtatcgccctggacgatggggaagaatgtgtctgtgtccagtctatttcctactccctgttgtgcaggtggtttcgggcggcggtattgccgcaggataaggaactggaaacggcactgttccaccggctgaatgctaagaaatgctccgtatgcggggcgctgtttacccccggttccaaccgagccaaatactgcccggaatgtgccgcacgcatgaagcggatcaacgccgcaaagcgcaagcggaaacaacgggagaaatgtcacgctttaggggctgaaaaacccttgtaaatcaaggcttttttcgggggtgtcaaaggcagtctgatagatttatcctctgccccctaaaatagccttaaaatgcgtacagaatcccaagagaaaccccaaggaggaaccctatgtcagacaaccgaaaatattattacctgaaactcaaagaaaactattttgacgatgattccatcgtgctgctggaaagtatgcaggacggtgtgctgtattccaacattctgctcaagctgtatctgaaatcgctgaaacatggcgggcggctccagcttgacgaggacatcccctacacggcgcagatgatcgccaccatcacccgccagcagatcggcactgtggagagagccttgcagatctttttgaagctgggccttgtggaagtgctggacagcggcacattctacatgagcaacatcgaacttttaatcggccagtcctccaccgaggctgagcgaaagcgggctgcgaggctccaaaacaaggctctttctgcgccccggacaaacggcggacatttgtccgacattcgtccaccagagatagagatagagttagagaaagagatagagataaagagagagatagagaagggatgctccgcccgcgcctatggccgttaccagaatgttttcctgacggacgaggaactggcagacttgcaggccagttttcccactgtatggggccagtacatcgaaaagctgtccgaatacatggcctctaccggtaagcggtatcagagccatgccgccaccatccggcgctgggccggtgaggacgcgaaaaaggcggccccgcccacccgcaaccgtgattacagcgtaaaggaggatgaaaccgtatgatggagattaccgcagaaatccgggcgctgatcgacaaggcagccgtcggtatggaactggccggggacgagtacatagacccggcagacgggctcattcactgtaagaaatgcggcggccagaggcagaccgttgtgccatgcttcgggaaatccggctactttatgccgcgctgcatctgccagtgccagcgggaggctgaggagcagcgcaaggctgctgaagaacggcagcgccgcatggagcgtatcaaacgccgaaaggcacagggcttgcaagaccgttatctgtatgactacacctttgccaacgacaatggcaaaaacccattgatggacaaggcccgcgcctatgtggagaactggaaagaggcatataagagcaatatcgggcttttgctgtttggagatgtgggaaccggcaagtcttttttcgccggatgtattgcaaatgctttgcttgaccaggatgtgccggtgctgatgacgaactttcccaccattctgaaccgcctgaccgggatgttttccgaggacaggtcggagtttattgccagctttgacgagtatgacctgcttatcattgacgatctgggagtagagcgcagtaccgaatatgctatggagcagatgtttttcgtcattgacagccgctaccgcagccgcaggcccatgatcatcaccaccaacctgaagctggccgaactcaaaaacccgcctgacctggcccacgctcgtatctatgaccgtattctggaacggtgtgcgccgattctctttgacgggaataatttccgggaagaaaatgccggtgctacccgacaggcagcaaaagacattgtaaacagtaagcacgactgattttttaccgggcggcacagacccgttcggagaaaggagcgccatgaacaaagaaccccgtactatgcaggtggcagacgccgctactgcgtccagagcgccggaaaacacgccgacgatggtaaagaaaatcggaaagacaacctacaaggttcatgtccatttcagcaataccagcacagaaaccatgagcgataaaatcaagcgtatgctcaaaaatgaaattcagcaaatgtgacagactgataaacgaagccgccttgtgctaaactgatgatggtacgcaccaaaatttttgtcaaggaggacacgaaaatgctttacacagaaaaagagaagcatgaaattgaacgagtaaaggaggtctttgcggaacatctgcggcaaagccctgattttgaactgctctggtcggacaaggtaggctatgtctggctgacgattggcgtaaatccagtctatgtggataccggtatcaggatagaatctgccgccgatctctgctgcaagtgtttggatgatgttgctacggatgttttgtatatgacgggcaacgatcacgcgctggaagcagccgatccgctggaattggccgaaatcaagcggcgctgggagccatatatcaaccagctgccagactatgcgtatctctgcaaagacctgctgaacagaaaaatgtaatctatcaaacgaggtgtcaggagccatatagcgcttctggcaccttttttgtagattttttgtgaatttgattaaaaagtccttgacaatttgtctctggcaaaacgctgaaatccatcttaatcagcgtcggcgtccggctgtcggcttttaacctgccgcagattgcaaggcttacctacaccgacgaccttcatctggaggaaatgggcgagaaaaaagtggccctgttctgctgcatcccggactcggataaatccctcaattaccttgtggggatgatttacgggcagctcatccagacgctgtattttgtagccgaccggaaatacaaaggccggctgccggtgccggttcacttgctcatcgacgaagcgccgaacatcgccctgcccacggacaactttttgccctggctttccacaatgcgaagccgcaatatcttctgcagctatatcgcgcagaatatggcgcagatcaaggcgctgttcaaggagcagtgggaatcgctggtcggcctgtgcgacgagtttctctatctcggtgggaacgaaaaggaaacccacaagtatgtttccgagctcatgggcaaggagacgttggacacgaatacctacggccacagccgcggacgaaacggcagtttcagcatcaacgaccagcagacgggtcgggagcttctcgcccccgacgaagtacggatgctggataaccgcaaggcgatcctgtttgtccgcggggaacgccccatgatggatgacaaatacgatctcatgcgccatccaaacatccggctgacagaggacggcggcgccgcgccctacgattacacgctggcaaagagtgccgcagatgacctcgactactctccagaacagtatggcgagtttgaactgctggagccggatgattttatgaaatcgtaaataaacacatattgaattggaggaatgcttctgaagaaattcaaaattgcttttaagaaagcacccaagaagaatcgcaggccacagaatacgctttctctcggcagaaatggacgatttggtttttccgcctacatcgccgtggttctgtgcttctgctgtctttcaacaaccgtctttgctgccggtgacccgctggcagtcgtaaataatctctccaccttcattttttccttgatccgcgccatcggtctgatcctgttaggctggggtgtggtacaggtaggtctttccttccagagccatgacccctctcagcgttcgcagggcttcttaacccttgccggcgggcttgtgattacctttgccaaggaaatcctcgatctcatcaccgcctgattgtatattttcagccggggagcaaccgtcgccggtcgttccccctcgttttcttcaaggaggtgaccaggcggaaactggattattgataacttaaattcggcgctggaaacatggaatgataagctggcggaaatctggacactgctcacccaagatcccgcgaccttcaaaggcggtggaatctggcaggtcatgctggacatcaacggggccttgaaagccatcgggtacgggctgctggtcctgtttttcgcagtcggcgtcgtcaagacctgttcgagctttgccgacctgaagcgcccggaggctgttttcaagatattcattcgctttgtgctggcaaaggcggcggtgggatacggtctcgacctgatgctggctgttttcgggatcattcaagggatggtggccaccatcatctcacagtccggcctgtcgggaagcagcggagcgacgctcccgcaggagattatcgacaagatcaataccgtgggcttttgggacagcatccccctgtgggcagtcaccctgctgggcagcctgttcatcacggtgctggcgttcattatgatcctaacggtgtatagtcggatgttcaaattgtacatgtatacggctatcgccccaattcccatgtccagtttcgcaggggaacccaccagcaatgttgggaaaaacttcctgcgttcctatgcaggcgtttgcctcgaaggggcgattattgcgcttgcctgcatcatcttctcgattatggctgcctctccgccggcggtcgatcccgacgtctcggcggttaccgccgtatggagctacgtgggcgagctgatctttaacctgcttgttctggtcggcgccgtgcgaatgagcgaccggatcgtcaaggagctgttggggctgtaacacatccaaaaagcgaacaggccctgcggaaaaccgcagaacctgttcgttcattcatgatctaatatccattgcagcaacccctgccggtcaatttgaccggcagcgacggatagaacaatatcaatcaattcctgttgttcataacggagctcgatcccattcaccgccaggaaaaccagcatggtatgcgcgccgatacgcttattcccatccacaaagggatgattgcgtatcaggccaaagccaagctgtgccgctttggcctgcagagacggatacaccggttctccgccgaacgtttgaaacggtgcggccaatgcggattccagcagcccttcgtcccgaatcccgtcgatgcctccgaattcccggattagcgcggaatgcaaagccgtcacctgatttttggataaggttttcatttggccaactcctcataagcgcggcggttcttggcgatcagccgcttggatacggccagaatatcctcgtcttccgcaagctgctcctgctctgcctggctgaattccaacagcacataccgcgggacattgttctttaagatcacggctgcgccgttttcgtccaccaagcgcgcaacacgggaaaagttctgatttgcttctgtaatggaaacaagattctttgtgttcactgtcatttgtaacacctcctacttctattatactcaaaaataggataaattcaacctatttttaaaggagctggttttttatcgaagtcaaagtgccaaaggaaatccgggattatcaggagtccatcttcttcgggctctctgcccggcagttcatctgttctctgctggctgtaggcgtggcggttggactgtacttcggcctgcgtccgctggtcggcagcgaggaagtgggctggatgtgcattctcggggccgctccctttgcagcctgcggctttttcaaataccacggcatgaccgccgaacaggcggcttgggcctggttcaagtcggaatttctctatcccaaaaagctggtgtttaaatccgacaatctctacttcgacgccatgaaggacgccatcgctgaaggagagaagcttccccgcaagcggaaaggccgaaattcccagccatcggctgagaaagaaccgtaatctcaaaaatctctcagaaaaggaaggatgcctataagtaaaacgctcagcaaagcggcgaaagcagaaaaagagaaatttacgattccaaagtccgtacaggacgctattcccatccagcgaatctggccggatgggattttccaaatcgggagtcggttttccaaaaccttctcctttaccgatatcaattacagcatcgccagcaaagacgacaaaacggcgatgtttctcgactatgccgagctactcaacgcgctggactccggcgcttccgccaagatcaccatcaacaaccggaaggtcaacaaggcagagtttgagaaatccctgctgcttccgatgaaagaagatgggctggatccctaccggaaagagtacaacgagatgctgctttccacagtcaccggcgtgagcagcagtgtcgtgcaggaccgctacatcaccatcactgtggcgaagcggaatatcgatgaagcccgcacctatttctcccgtgtgggcacagacctcatcacccaccttgcccagctttcctccatagggcggaaactggacattgcgtcgcgcttgcagatcttccgggactttttcaagagcaatgagcctgccgcttttgcctttgacctgaaagagcacatgcaaaaagggcacagcttcaaggattggctgtgccccgacagcatggagtttcacaaagaccattttcgtctcaacgaccgctggggccgcgtcctctatctgcaggattacgcttcctacatcaaggattccatgattgcagagctctgcgacatggatcgcagcctcatgctttccattgatattctgacggttcccaccgacgaagcggtgcagggaatccagaacaagctcctgggtgtagagacgaacgcggcaaactggcagcgcaagcagaacgccgccaacaacttttcggctgttctcccttacgatatggagcagcagcggaaagagacgaaggaactgctcgatgacttaacaaaccgcgaccagcgcatgatgttcggccttgtgaccatggttcatctggccgattccaaggagcagctggacagcgataccgaaacgatcctcaccacagcgcgcaagcacctgtgccagatgagcgttctccgctggcagcaaaaggacggtctggacacggttttgccctacggtttgcggcggatcaccgcgctgcgcaccctgaccacggaaagcaccgcggtgctgattcccttccgggcgcaggagatccttcaggccgggggtatctactacgggcaaaacgcagtttccaagaacatgatcgtggtggatcgccgtaagctcttaaacggaaacagctttcgcctcggcgtttccggttccggcaagtccttctccgccaaggaagaaatcgtcagcatcgccctttccaccaacgacgatatcctgattctggatccggaatctgaattcggcttccttgtcgaggccctcggcggtgaagtgatccgggtatccgcctcttcggacacccacctgaacgccatggatatggacaaggcctacggcgacgaacgcaacccgctgatcgaaaagtccgaattcatcctctccttgttcgagcagctggtaggcgccggcaacgtgagcgcaaaggagaagtccatcctcgaccgatgcacctatgacgtgtaccgggaatacatgatcaataactatcagggcgaggcgcctaccctgaaagatctgtatcacacccttttaaagcagccggagccggaagccagagggctggcgctttcctccgaactgttcatcaccggcagtttgaacacttttgcccagcgcaccaatgtggataccaaagcccggatcatcgcctacgatatccgggagcttggcgagcagctcatgcccatcggcatgctggtcacgctggacgccatcttcaaccgtgtgatccagaactggaagaaaggaaaaaccacatgggtctttgccgatgaattttaccttttgttccggtatgcgtacagcgccgatttcttctacaagctgtggaagcgcatccgcaaatacaacggcctcgtgacagggctgacgcagaacgtcgaggagcttctccgttccgataccgcccgtctcatgctggccaacagcgaattcctcattctcctgaatcaatccgccaccgatcgggacgagctggccgggcttctgcatatttctgaaaaccagctcagctacatcaccaatgtggcggccggctgcggcctgatccgctgcgccggaaacattgtgccattcgaaaacagcttcccccgcaacacgcgtctgtaccagttgatgaccaccaagccggatgaagtgctgagaggggcgtaaccatagatgaaattatattgcaacagggggccgccttcggccccctgcatttttatttggaggtatgctattgaaagaaatcaaaacaaaagctgaagacgtaaagccgaaactgatggagcatgcagctaaagccccgaaaaccgccgcgaaagacctgtggctgaaattcaaagaaaaatccatatctgaaataaaagagacgccattcgccggccagcgtggagaatcctcaaacgctcccgccaacaatgccggagatcagatgctgtccggtgcggagaccactgctagggaaggtgcaagcctgacctaccgtggtggaaaaaagctggcgcaggccacaacccggaaaatcaaggagaagcaggaattttcccgcacgctttccgaagcgaaacatacgaccggcaaaacgatggacgccgcgcaaagcgctgcctctaaaattcggacaaagcatgcggcattccgggccgtcaagggcaaaccgcaaaaggtcgtaaaaaccgccggccgatccgtgaaaagcttaaagcagagcgtcaaggggattaagacagcgcagcgctcgtcaaaagccgcgcagcaggcggctaagacggcgcaaaaaacagcgcaggccactgcaaaatcggtcaaggcgtccgcccaggccgccaaagctgcagcgaaagcgacggtgacgggcgtaaaggcggcgatccatgcaactgtgacggcggtcaaaactacgatcgccgcagtgaaaggtttgatcgccgccatcgctgccggtggatgggtggctgtggtcattatccttctgatctgcctgatcgctctggttgtgggttcctgctttggtatctttttcagcggcgaggattccgggaacgacatgaccatgccgtccgtcgtgcaggaaatcagtctggattaccagaatcgactgaacgagacggaatccgctcagagctacgatgtgctggagatttccggttcccgcgccgtatggccggaggtgcttgccgtttattccgtgaaaaccgccaccgatccgacaggcgcgcaggaggtagccaccatggacgaggctaaaaagaagattctgacagatatcttctggcagatgaatatgatctcgtccaaaatggataccaagaccgaaaaagtgattgtgaagacagatgatggaaacggcaatattacagagacggaatccaccgttacccgcaagtacctgcacattaccgtcgatcacaagacggctctggaaatggccgatgaatatggattcgatgaagatcaacgccgccagcttgccgaacttttatccgatgaaaacaaagaactctggacacaggtcctctataggatcaccggtggtggcagcgacatcgtatcggtggcgctttcgcaggttggcaatgttggcggctacccatattggaaatggtatggttttgagacacgagtggaatggtgtgcttgttttgtttcttggtgcgccaatgaatgcgggtacataagttctggtatcatcccaaagtttgctggttgtaccagcggcggcatggcctggtttaaggagcacggccagtggaaggagcaggactacatcccgaatcccggggatatcattttctttgactgggcctcgaacggtctggccggcgacgccgatcacgttggcattgtcgagaaagtggagaacggaagaatttatacgattgagggcaactccgatgattccgtccgccaaaacagctatcctgtggggtatttggaaatcagaggatttgggtgcccatcatattgagataaaagcgcattttttgcaaatcaatccgataatcccccccgcttctcaaaagcggtatcgaaatatctcttcgagaagagctgttctgccaaagatgcattgtcgcaaatttatatcaatcaaaagttacaatttcttgcaatgcctcgtattccattggacaagtatcatttggcgagtctgccaatcgaatttcgtacataacactcttatgttctttgaacaatccgtttttacttatcctaatggtatagtatgtatcatcgctgtctctgctcactttatactttacaagaggatctgtaatcagctcagcgttatctcttacaaattctgaactgtatacttccgttgagtcataggaaagggaatggtattctgtacttttcgcgttaatgggaatcaaaatattcacaaaaaaagatatcgaaaagaaattggaatccaaccatcgaatttttatctttttaccctcatttatccatttatgattaattgcattatttatgcggcactgtataattacatcctcttgtgaaccaaatctataatttaattccgggaaccttttgtatgggacccactctgtaaatccagttttcaaaacttttcgctcacggaagcagggggaaagatctgaaaacacggcaattttatggttttttatgtactcatatcttgccagatccaaattttgaattctatgttgtggtggtcctacgattatattcgaaggtgttttcacacctccattcacttcaactttttcaggaatggtttccagaacatccggatactttctttctgcattttgtagtgttagattgtaatacccattgatatcaaaatttttaaacgcaaataggtttcgcaaactcctcaatacacggctaatcttaaataatactctgcactcacgcgctagctgaacgacttcacaaaaatccccaacatatttgtattcgaggtaatacgctaactcaaagtagtttctaaatgcagggaatcccgccaacactccaatgtcttcattatcaagaaaagtttttgcaaacatgtgcagcaatagatagtcctgtgtaggtgcagtgatctccatatctgaaattcgaatttgccttgtatacttccgccaatcaaggactgtctcgcttatctcgccactacctgttttaagctcaatcgttggtttccaatttccatccgacggaatcattttatactcataaaaattctcgttgtaatcaagcacaggctccatgctttcaacatgattttcttgattataacccatagatttgagtaggcaaaaagctttactaatattctccctgctcatcaacacatcaatatcgccagcatctcttaaatggacatttccatatatctgtagcgccagtggatatcctttaagcaagcaatactctatttcattctttcccaatagagaaatcatcatacgaagcgagctcatatacttatcatgatgatctgtaaatctatttgtatacaacttaatatatcggttatggggaagttgacggctcaactctttacaggttaaagcaaccagttgatgtgatgatgcaatcctgagaaattcagggacatctttttcttctatcagaacatcagacttttccagcttattttcaaacaaggagcgaaaaaagttgaaaaaagactcattcatattaacattcatgttatgcttatacctctcaataaagctttttctctgatttcagcttttgacttaaccctaataattctaccaaagcaatacatgctccgttattattgttatcttcagctgttatatatcgcgcttttctttttacattgtctgccgcattcttcatgcaaatgcccatcaaagaattttgcagcatattaatatcgttcacaccatctcctatagagataatttttttagtcgaaagaccttcatgctcacatacttttctcaatgcattccacttatcaacattgccaacggaaatatcaacgatttcactatgagatttccagggatacacttcgatcttgtctgtgataacatcttttttgagatattccagcaatgcacctacttcactctttttgtcgtctttaaccgaaagcacaattctatgtatctctttccccctcatttcgtccacggtcattcgtgtgtggggaagatcatcatcaaccaacatttgatataaatactgattcctcgtgtttaggaaatacgtatgtgctccggaagaaataatgacattctctattacattgcttacttttttatccaagaaaattttacaaatatttagatttggagcaatctctagaggcttactatataaaacctcttttgttcttggattgtagatgaacgcaccattaaagcaaatcatcattgtttctaattcaagcaatcgataatatcgataggcatcagaaatagatctcccggttgcaatacatatgtaatgatgtttcttttcttctttaatcagttctacaaataacggggacatttgataagtattggtaatcgttgttccatccaaatcaaacgccagcatatcatagctcatcgtgtataactactccttttcatggtcgtacaagacccccaaaataagttgataaaccaatatggtaccgttcgtacagacagcataatcagtaaaatgacacttgagaaaacagatagcggcaaagctttcaggaataatcccgtccagcgccaaatataagtgtttttcgtctcaagtctatttccgagaatattaattctcgccattttcatgtctcggggatctggtgcggtaatagaggaaacattggcacccccacatccggcaaaaaagctctgataaaaaacgcccttgctggataatagtacgtttttagtaagcgaacttcataatcaagcagtttatcgtaacctaaccgtgtttcttaatcaccacaaggttttgtaggtaagctgttttgctttttcaaccagagtattcggcgattatatctgtttccctggacatctaagatgattttttcataaagtctgactttagggttgtgtattctttgaacggcctttaaagtgtcaacatcccattctcgcagtttccccctttgttttaatgagaactacctcaaactccgaagtatttatgtacttactaaccagagaatcgtatactccctcgcagccgcacacgatacaagtttccttttctacggacactgcaccttgagcatcctgccatacctcatttgttaatgattttctagtaatctgaattcccgtatttctcgaagcatccttggaaaaaactgtagaaagatacttcatgtcaaaataaacgatcgaatccgcatgaagttcataggccacagtaatatccatcaactcaggtatattcctatacgcattcaccgttattccggccagacttcttcttttttctattgaggcagattctggaaacagcgacatatacttatccacatctatgacctgcatatttgcttcgccataatgcttaactattatatcatctaatacaatatctgcaggtgatgatttgtagcttaatgttacaatttgtccacgtttatggctttgccgtatttcatcactgtcgtcagctattttttcaatcctacttaatagcgatacattaatcagaattctgtcattctcctgaaccgcttgatctatatagcttttcacagcccgtatgcagctatagccacccacaattaacctattttttttcatgaattttctccgaaaatattttttgatatattattgcatcaggtttccataagaatgcccgatcaaaatgaattattagcgtccccatatccattcccaggcaagaggtaatctctttgtgtatgttgtgtaacaggtagacatcaagcaagttaaactgcaccatatttgagacagaataactacagatacacgaaactctttcttctgggtccaaataaaaatgaatatacgtcaagcatttgggtgaaccatttattccggcatcttcatctggcttggcaatggcaatcatcgctctagaaaacacatcgccatgctctaaaacctcttgcgcaagcgcaaattgattcacattcttttccccatgcttatatatcctctttatttcaattcctccattttcgaatttatatcgagcaggataaacacgagaaaacagtttgctcaacaaacattctgctggcatttcctcttgggtaaaattctcaatcacatatgtaatattatcggtacatacacaatctctctgatacataaccccatctttaccgttctctaaaagatggcgcatcgctatcttccagcattcatttgggttatttgatcggatctccaatctgaatcactccccgatgttaatctgaatatccgtcggctgcacaattttttcatcatgggtgacgacgatcaggatgcggtttttgcactgatttcgaattgactccatgatcgggccttttgttttgttgtccaacgaggctgtcggctcatcgaaaatcagaacggatgcattcgacagcaatgcacgcgcaatgcccattcgttttttctctccatccgaaaaggctactgtctcgctgctcacgatcgtatccaagccttccgggagcttttcaatcagcttatccagctccagcaagctcaatgtttcgataatttcatcgtcggtgtgatttgcaccggaaagaagcagattatcccgtatcgagcatgccagaaattccgtgctctggcttgcaacagaaacctgctcgcggaagctgcgttcatcgtaactttcaatgtcgtttccattgattttgatttcacccgctgttggtttttcaaatctcagcagcaatttgagcagcgatgtcttgcctgatcctgagttgccgcggatgacaaccgtatcgccggaagcaaaccgataggaaagatggtcgaataagcattttccggtctcttcatactggaacttaacatcatccaattccagcgaagtgacgtttccacactttcttccagcttcctcctgattccgttccggcagcagcagaatgtcgtccatgcgcttttgattgccaatggatacaaacaggctgataaaccatctctggattccaaagaaaaccggggtaagccacaaaatgtacgcattcattgcgtatatgtcgccaaccagcatctcgcccgactgaacccctctctgcgaaaacacaagcagaatgacgatccggataatctcacaaagcgccgtctgtatatcggccaacgcgttcatcgaaaacatcttatttacagctttggtgtagtgcttctgccaggtggactccgattgctcaacgtattcccctaatccgagaacacgcaaatacgcgctcgaataaatcgaatccgaggcgatagagttgccttcaatcagcgcttcgttcttttgccggttggctgtttccacaggctttttcaggagctgcgcgccaaaaatctggaaaatggaaacggcgatcagcagtattgcgatgggggcgttgatctgagccatgaatatgaagcccacaacgatggtggttgtgtaccaaaccaagttgctcagcgtggagaagtagaaatctgcaataacaagagaaccgtggatgattttattatagatctcctgatgcgaggtttctgaaacccagcgcgtaggctgctgaactacctttttaatggtatcgagccggatttccttaatgatatcatatacaaaacgactcaaccatgtatcaagaacatacagaaccagaacgatcaacggacacaaaacatagagaacgccgtaaacagcggtattggcagactgtgcctggtcgcctgttacgctgttgatcagtctctggagcatcattgtcgggagcagcatgagcgtacttctgactacgccggaaaggatagacagaattactttcggaatatggcatcttgctttatggaaaaacagctctaaatatacatctctacgcttcattaagttcaccccacacttttgaaatttcatcatatgttccactggcgactacacggccatcatcaaacagaatgatatggtccatgcggtcgatgtacttcaggttatgtgtaatcaatacaagcgtctggtccatttcaaggagataggacatgaccttttcgaccgcatgatcatcaagcccggtcgtcacttcatccagcaggaaaaagtttcggttcacagacaggccccttgcaaggccgaccagcttttgctgcccgccggagagctgcacgcccgtaggcccgataaccgtatcgtatccattgggcaggttcatggccagcttatccatcccaaagctttcgatcacctgcgccagcaccccgctgttgacttcacccagccgcaggttgttccgaagcgtgtcattcaccaaatatgtagtgctcgggatcgaggaaacgcttttcagcaatgtcccccgattggactccgtgatccgctccccgcccacaaacaaactgccttctgtgcctgtcagcaaaccggatagcagactcatggtcgtgcttttgccgcttccggtttttccgacaatcgcagttttctttttatacgggatagtgaaagacacgttggaaaggatattcacatcgttgattctgtaacttacgttgttgaaggaaatatccccatgcagcagattttcgcttacttccatttgctgctcgtctttttcgcagagcacctcgtcgatctctttgatcttaaaccatgtctttttgatggagagatagatatcgccaaaattctggatcggaacgcagagggtcgaaaccaggctgacagccgttacaagctggccggccgtaattgttcccgaggcaaagctcgggatgctgatgcaaacaatcagaaccggggcaaccgaattgatgacgcgggtcagcgttttataaaaattgaggcatatcttcgaccttacggtcgtttcattgaacgtattgttctcctgctcgaaagcgtggatccggtcgccaattctcccgaaggatttaagaagcgtaaagtggtcgaccaagtcgaagaagacacgcgtaagccttttttcactttcccgaatgttgttggaatagcgctcgctcattttgcctatcggcttcgctatgatcacggaaaaagcatagataaacgcagcggtaaaaggataaatgatattgatcgagccaagttccacggctgccagcagacccgtggttaagctaatgataaaacgaatgattctctcgatggagaattcctgaatatcatagatatctttgctgcagatttggaaaaggcctgtcggatttctctttaaaaaagagggataattcatcgtgtgaaatttgcgtatcaacgcgtgatgcagactggtcacaaagttgcacgacaagcgcgtgagaaaaaacgacaggagtattttgtccaaaaaatacgtcagggccgtaattacaataagtgccaagagagaacggataaaaaccgaggtgatttgcatgcggtcgatcacagcgccaaattgaacggacatctggacattcatcaaggaaagaagcggcatcacaaccgcaattcctataacgagcgtgacattctttttatttataagaagctttttcatacagatggttcctccaataatttctgataaactttagaaaccgcatcgtccaacgtcttgttgttctcaatgacctcccatccattttccttggccaagttatggtataaccgatttactcgcttcaacgaaaagatgttttccgtttccttgacaaccggcctactgctcaatcttctttgaacaatatccatttctgccgaaattaaaaaaacgatatctggtttatagcataaagccaagcattcattaataaaatcattccaaacgaaccatgttttgtcatatacttcctgacacattgtccatcgatcaaccagaacataatcaaaagagctatacgcttccttgatcttctccgacgtcttcaagagatccaatgctaacgcttccgcaattttttgattaagttctcgttgctgctgtttgtccttctggctataagtatctctaatcattctcaacactttagctatttcagtatccccggactctggcttgattttagcaaccttcttccctcgctcaacaagaatactatagatagagttaaggatactagttttacctacaccatccatccctacgaatgcaattagtttcataatatcaacctactgctgtaaccacagtgctcccctttacatatttgtgcgtccttcgatccctaaatctgaaactgtctggtaaccgtcaagatagagcccaataatatctgtccttccaacaccacaatacatcgcgatactttatcttaacaaagccttcaccctaagcaactaggaagagatcaaaaggatatgatatggttgtatattggctttgagacttcatttttccaacggacaactccgcccacaagatattcaaattcttggagggatatatctccaaaaatgaacttaccaaattgaaaaatttcataatccgggtgtttgcgaagaaaaacttcgagactatttatcatggaatcccgatattgatttgtgccccgtttatgtgcaatatgataattcttcgccatatcatttaatacaaattggtagcctgacttgaatagacgatatccaaactcaaaatgttcgaatccccatccctgaaaatcctcatcaaatttttgagctgtagtcttactaatagacatattaccagaaagagttgaaatccagggaaccgcactcatacattcgccatccgcatcaaatagattccgaatagtagaataataagttgccggacgaattatttgtttcttagatagatcatagggggatttcgatatgttttcataaaccccgccaatacatactatctttggaacaagcttctttctatggaaatcaaggtgtctttgcagaaagtcagcacaaggatatctatctgcatcacaaaatacaataatttcccccgtattcttttctatgcctacattacgagagtaactccgtcctctatttattgcgttttttatgtagatgacatccattttatccttgaaattatcaacgaccgtatcacaaggttcgtcagaacaatcatcaaccacaataagttcaaagctttcatctacaatctgccttgaaaagaaatccaaagtaagctgcaactgtcgtttctgattatatactggaacaacaacactaatcatcgtctctccccatttcattgtatgaaactccaacagcatgaaggattaacgcaaacaccgctaatcctcgaaacaaatctcgacatggtgccaggagtacttctttgtatgtaatctgaacgtctgcgtattttttacggaatgcaaatatctgcaattccggaggcactattttgactacaagccaaaccagaaaaaagtatagtgttatcaacgagctaaaaagcgaaagcagcgccagaactgccagaagaagatgagatatccacgaaaggaaatcaaaaacaatgctgaaaaagaggaaagtcttctccgccgcacttattacactgtagtgttgaaaactaaaaagggttttcatgcaaacaaacggagccttaatccaattccctgcttggaaaaagagcattttcacactatttgttacattacagtaatcctttgtaaccataggttcgatactttcaccaagcaacgctaccttaatcccaatcgggacgtcttcatttggttccgggaacaaaccgatctgcttcaaaaaagcgactctgaaacacattccatgacctacacagtagcagaacggagaaatcccacgctttttcgcttttttcagcaaataatttcttctttccaatcccatcgccctaatgctttcaaaaagtgcctcaaccttcatatagggagaagaaacatcataatttccgatatagagcgaactttgctgaataacattcgggcgtttcgtttgaataattctagaaagctcatcaatagactttaagtccggccttgaatctgcatcatacacaaggatataatcatccggcattaacttgtccagctgacgaatagcataattcaactgtgcacctttgtttcctttaaggaaagggtaattaaccacagttataggtaaagaagcgtaattggacagcgataataagctgtttattctttgtaaagtcttattctctccaaaaacacgtttctctttttctgttgtgactaaaaccaactgaacatctgatgagaggaactttgaaaaccaatccaaagtattttttatacctttgctttcattaaataatgcgataaacaaatatacggttgattttctcttccctttattgcatctatgttcattttggtttttgattacagttttatcgtcaaaaaacagcagccctaacagaattgaaagatcgaaaatgaattgaatgaaaagtaagccccatgcaacaaagttcatctactcaagcacctccgaaatccatttgatagctttctcgcgctccacagcagacataagcaacctgtctttaataggcagtgatacggactctccttcctcagagtttataagaagaatagaaagctccttgcattctaggctatactcatatagatcttttagaaaaatcggatttaacttcatgcctcgaattctatttggcacattgcctaacttagaaaattcattttctgcccattgatacttttgaaaaacatcataagtgtcaataaagctgagctgttgttctttcgtatctaacaaaccaaaaagatttgatttgcttggtccaatcaacaataatctagcggaaacagcatagctcgcaacaaatttttgcgcaatctgacatccggttcctgatgcaataaatgtaacgcgtgaaggcgaatacttttcagtataataattatatacagactttaattgtccaacataatcattcaaccttagacctaaaaactttttctcgtcaaattcgctatcccccattccataaaaatcgaaaaaaaccagagtcttatcgcataatttctctgcaatctgtgaaaacagaaatccaggtccagatttgttctgtccaaggccgtgaacaaaaataatcatgtcttttgagcgaccttcaattattcgaacacaatgagcaccatattcggatagtagctttacttccttttctcttgggccttctacactttcatttttctcgatatgttttaccaccttttcgataagcaactcaagccattgtgcccttgtaaacaggtgatctgcgtcgggaattcttagtataggtatattgttcttttccaaaaaggctaaagagtttttggtcaatggatcgctcccagaatagactgcggcaaatcgtgtatgccttttatccggcaagatctcaacattccaactacgatatttctcaacgatttcccaatttacccaagtcccaaaattgctatcataaaccaatctttgatctcttattttgggtcgcgatatttcattcatattttcttcgggaactaatattgcattgcaaaagcaaataaaactagccgttgggatttcatctatagcgcgtattgcaatttttccgccttcgctaaatgcaacaaggcccacttgcttaaagaagggaaatttatcaagaacatatctgacaacatgggacagtgtagaaagcatcagatcgaaatcattttttgagtaatctccctgagtacttccacctccgatgtaatcaaatcttaatacactataccctttttcagccatcgcttgagaaagtcgagtaaacatatgtcttgagtctgtcctatccccaaataggccgggaacgatgacatataggccacttccatcctttatgccagtagttaaaacacaatttatctgctggccttggtaaggaacgctcaaataaatatcatgaaatttcagttccctgactttaaacatatttttccaccagatctacaagatttttcggggtttggaaattttcaagaacaagctcctcatcaggaatcacaatcgaaaactcatcctcgagcattgcaagcaaacgcaaaacgcctaacgaatccaacccattgtcaaataagtcttgagaaagctcaagttttgtttctaattcggtttcaataatttcgagtactctgttggtgatagaatccattttaattttctcctttgtttttagtaaataatgagtttgtaaaacatcctgactttgtaatctggattacaagataaaatcactctcctcaactctataaataatatctaagagtccctgcagatattgaacagttccaggcgttcttcttaaatagcgatagttttctttatgtttataaagctcacgactcgcatttttctgcatacacagcttcactttataaacgaattcgtcgctattttcgattccatggaaatagctgcgcgcagactgcattgcctccgacttgacttcactatcagctgtgctataaagaatagaattcagcaagtttgcgaaatcttcttcgggaaatcctaaccgataattatcaaagtcaataagataaaagctcccgttggaaacaacaatgttgttaagtgtacagtccccatgaacaattatttgttctctatttctgaacgctcgatcgtattcctgatcaattttttgtagcagctgaacggaaccattaactcgctctgtcaggtcgtcgatttcgtcccacgcgtaactgggcacaaaacttgattcagtagaatcatccggtaatttagtttccttccaaagtatatttttggttcttccatgtatttcagaaattgtctggaaaagcaactcatttaccattcctgcattaactgtaactccaggaacgaacgtaaaaatgacatatttcccgtccggcaactcaaaaacaggcgcccccgcctcagatcggagtactttattggtggtcaccccacatctttcaagttcggcatataattccaccatatcagcaagacaagcagaatccgttgctaaaggatacttcttcacaacatactgacattcattactcttgattcttagactttctctaaacattaatcgcgggaccactttgtagtcggctactttaatcccataattattttcaatatattgcactattctgtctgttttcataatagtctatccttctttatccagtgctcttcggctttttaacgctactgccttaatcagttataaaaggatttggcgtatttaattccatgccggctttcttttccagaaagtacaacaggttctgccaataaagatcaattcctgttgaatcaaactcctgcttttttctgattctctcttcttcttcaagaattctggctttctgatttgtattcagctgtgtcatgggcggcatttgaatcggcgttttaggctttgctgaaatgattttctccaaactatcaaaatgcttttcgtatacatgtaaacttcccactatgtgcttatagaaacccagatcaactcctaacgcaagagacataagttcttggaacatcgtgaagctaaacacatcataaggaagaccaagatacaagtcatttgatctcatatatgtaatacaattcaatttgttggaacgcagcaaaaattgcagtacacaagtacacgggatatcccttgattgcagccccacgtcttccgcacgatatataggaataattgcctgtcttgaatcaggatctcgcgataaaagttcaattatagcctgccaagaattcatcgaattctgtttgtcaccaaagattctaggcccatatgcaccatgagccgttattccatcgtcagaaaagtttgggtaaatcttgctataatactgcatgattttaactgagttgcttccccttaagtaccacaagaattcaccaaccgcaaacgacagagacattttacgtcctgtatttccaagaatacgttttcttgggtctttaatttcaaagccctcaccaattaattccttaattaaaagtccccttggcgccgctgtctgtgcatttctaatcttgtccgcataataaacataaacatcatcaatagattcaaattgcttcatgttatacctccgttaaatcaattttctatactatatggtattaaggaaaaactaccattactgctttaactacaaatttcttattttatcttaaagtacagtataatactgttttacccgttttatttttccattgtatgttttcggtatttgtcttacctgatttacctcagaaatctttacctgtccaaacgagcaactacaaaacctcataaattcgtgtttacaaaaattgttattgactacaatatccgcaacaacacgttcacctaacaaatcatcaggtttcccatagactatgcattcatccactccatcgaagttattgattatattttcgtattcttctggataaacattgatgcctccacagataatgatatttttttctctgcccacgatgaagagatatcccgcttcgtcctgaaatccaatatcacccgtctggaaccaaccttctctaagtactttagctgtctctgccgggtttgcgtaataccccgtcatccgacacggtgaccatatccagatctccccgggggcttttgcccttacttcattgccatttttgtcaataattttgacttttattttatccatgggttttcccacagatccaattttatcagggtgcttacttaagttcagacaggaaacccttggacctaattctgtcattccatatgtttctatcagatcgatatctttatatctatccaggaattcaaaaattgaacttctttgtattttggctcccccaaagcatagggtttttagcttatagaatccttccgaccgttttgacttaagcaacatgtatatttgtgtcggaactaaagtacacgtagttacttgatactgcagacaagtccgccaaaaagactgtggcaaaaaagggccacgttctattacaattgttcccccaacaacgattgatgctatgaattgcgctgtatgacaatatccaaaacacatcggtaaacacacgagaaacctttcatctgttttatactgcatttcttttatatgcatcttcgcattctttacaatcgcctgttccgacaataccacccgtttgcccgtcccacttgtccctgacgaacctaaaataacactgcattcattgaaaagaattatctcatccttctttatggagttttggttttcttctccaacaaccagcaaagaaaaattattctgacaagaatcgtcaccaagtaagcgttgacctgttatatctgttataactatatctatttctagatacgaacataatgacaacacttccttacgggataatttcttcgaggatagtgcaacatttttcgcagcactaactgcagcgaaatacgataagataaactcatatgaattgtcaaggtagatcagtacattttttcgggatattctctcgtcccaaagatgcttggtctccagaacatcattccagagccccgcataggtatacgagatgccgcgatcaattaccgctatctttttactatcccttttttcttcaagtaaactaaacagccccatattctttgtagcgccctcccgttatttctttgcaaacccaaacactctagaatctattgtaaaaatctgtccggttatacctctgactaggtcagaagacaaaaatagtacgcaattaattaaatcaacaagattattttctgttgggaacaaactcaaataatctgctgcttgtcttttttctgggtgattcttattcagccctgtttctataaatccagggcaaatgacattcacatggatgttatatttcgccaattcttttgccgctacaatacacatctgagaaactcccgctttggaagcaacatagttcgcctgtcgtgtccttgctgccttcccttgactggatgacaaaacaaagactttccctccagaacatttcatgtaagaggatgctacttttagaaaattcattgtcccagtcaaatttatcgaaatcactttctcccattgatctgcagtcatttcctcaatttcggcatcgtcagtgatccccgcacaattaatggcaatgtctattcttccatatttttctcttgtatactcgcacacagaattcaactctgaagggtgccgaatatcacagtaccggaagttgtcttccagcatctctgctacttcattggttttagtagaaaaataggtcgcaacaactgcagcgccctctttacagaagcgatttgctaaagcctttccaatcccagatgatcccccaaaaatcaataccacttttccttttactgacacaaacacgggagcacctcttcctatctatagtcgaaagcaaatcttcttagcattaccattttcaagctacctctcagcggtcaaacaagcacccgcatacatatttgattaaagagccatgtaagcattttccatttatgtatcagctaaaagtaaccacaatagctttaagaagttgcaatgtttctcttccttttgattgcgagtaatacaaaaattccaatccaaagttccgctgacgcgtagactatgctaaaacatgacgagaaagaaatcaagccatttcacacgaaacgacaaaaacaccgaatatttgggcaaaaatgggaaagggcactgccttgacaggcagtgccctttcccattttttaataatattaccctgaaatattcacagggaatacaaccactgagtgaaacgtcttatcattttcttcgtaatattgctcaagattgcctttatacttcttcataatgcgcttcacactcataagccctataccatgctgccctcttttctgtttccgcgagatgaagcccatccctgaagtttcaggcggttccttacaagaattcacaattgtcaacacccaggccttttgtgcttcccgcacgtcaagcgatatctctaaaaacggattttctgatccctgcgccgcttccaacgcgttttccgttaaatttccaaacagcgacgttatatctatactgtccatactttctactgcacatttgcgaatatcaacagaaaatgagattcctctctcctggcatagatcgcgataccgaatgagcaaggtgtttaataccggatccttacaatactgaacccgccgctgcagtgccggaaggcgttccatctccgaaacatagtttgcaacgacttttccattctgaacctcagccatttccttaatggctgcaaggtgatagcggatatcgtgaatcataatccgctggttatcatactgttcctgcaatgttttataatacgaccgatccgcctgctctttttgctgctgtagccttaaatccatatatctctgattcatttgctgtatatactggtaagctgcaaatatcagaatgtttcccagaagaagagccatagcgcagccaatcatccagaactctgcagcgcgcgaaaaactcgggagctcaagacaaatataaataagcgccgtgataacaaacacagaggaaagacacgtgactaacatcagaataaaaacgacgttgggcaccgggctctcttgctcccggcttttcgcaatatgaacgtaaagacgcgtgcagataaagtagagcactttgctgaacaccgcaaaaagaatcagcacagcaaatctttctttgtactgcccaaatccgtcaaaaaaagccccaagaaacagcattgacaggtattctgtacccagcataagcgcagacaacaataccgcgtatagagcagctttcccgattccgaccgtatatcctatgtaaagaatgagccctgtacataccgcaaatatcaagacattcacatgcacaaaattcaaagcaaagcacaaccaggccaatccatagcctaccccgaacaatatgccgcgaacccatgtcggccgccggggagagaataactccccaaaaaactgccaagctgtcagcgcttccgccaaataaaccactacaaaacagatattttgctctatcatcgtgtgctctccaagtacaataagtagttgctcttaaaatcgctgtatcgccgtttcgtcaaatatgcagaacaggtctgtccgtctggcaaattcaacttcaccgtatctttggtaaactcccctacatacctcatattcacaataaagcttcggtgtgtctgatagaaacccccgatctgtagcaggtcgttccacatgcgtaggggggaatttacttcatatacagcatcgatcgtcacgattttcgtcttgtgccgctctgtttctacaaagacaatgtcctccgcctggcggacgatcacgccgtcttttgtttcaatcgctaccggccgtgtctccatctcgatctgataaagtgcctctttcacgtttctgaacagtcgtgctttttcaataggcttcgacaaataccgaaacacatggaatttcatcgcctcatccagataatccatatacgatgtgagaatgaatattttaatcgagggatttttcttcttcagtttttcgcctgtataaataccgctcagccctggaatctccacgtcgagaaaagcaatctccgccgtgctctcactgcgaagcaacgcatcgccgcttgtataagatgcaatgtccggcacacgcaagtgtgctttttgaaagtactccttcaagtacttttccatctgaaccaaaatcattggatcatcatcacagagcagaatacgcacataaatccccccttttttcggggggtattataccgcgatataatttttttgtcaacccaagtttgattcattccggtctgccaaaagttttacaatttctgccgccaaatccacatcttcttcgctgcaaaggcgaagatggtctacgatactctgaggcacattattagagtgcatcgcaccctcaagcaaatagtccggtgtgacccctaactcatcacaaattttcacaaacagctctaaactcggcgtaactttcccggtttccacactcgaaaggtggtttccgttaacccctatcttttctgcaagcaccgcttgcttaattccaaggacttttctccttttagagatgcgacgtcccatctctttcctgtcgagttccatatacaagtacttcctttcaagatttgcattcatactatcaagaactcgcctaaaacagaatcatcttaaaatgatattctctttttaaagttgaatttcaaaaatttctattaaaatgattttttctttttaaccgtaaaattcacctcctaaaaccaaaaaaatttctaaaatgcgacaaaaagctttctttaatgcttattatgtggaatttttaggtaaaaggaagtagaatatatattgacgaaaggagtgcataatcaatgaccaaaacaaacagtatccttaaatccatcgcaagcttccttacctttttcttttctgctgttttgtgcatcagcgccaacaccgctgcttccggcatgatctatcagcctaaagcacctgcagaactgaagcgcttcagtagaattaaatgattcgctttatatcccgtgctgtagcagaatggctcctgaaacatggagccatttctgtcaatgagaaggaattatacgaatacagcatatattctttcctctttactttaactccactgttcttagtactaatggtcagtattccattgaatatggctgttgaaggaattttgctgattactccttttatttttcttcggaagttcgccggagggtttcattttcaaaccccactcccctgcatcattgtatcaacactggttttattggggtgccttctagaaaacagaataatcctagagtatggaagtttcattatccacactcttcttgtttatgcttcaattgttccaatttgtattttaagcccgatagactcagaaaatcgtcaactttctgcgaaagaaaaatctgcctttcaccgaattgccattgtgcttgcaaccatcaatgccgcactatattctctgctgcttattctccgcactgttgaaattgctattcccttaggcactgggatgattttgaccgctttattgcagttgccgtgcctttttgaacatcaaaagaattcgaatagaactagatagagcgcacaggacaagtatcccaattgtttcatttctgcatggtgtagtctaatcctcgctccctgctcatcttgttcttttgcggtgacgtttggtatgggtttcttcaaaaaagaatagtattatacattgcacacttgtcattttgcaagtgtgctttctttataattacagcctaaaaagcctttggttaattgcccatcgtggtccatcgccgcctccgacaatctgaattttcccaaattccagattgatcggaggaaacagtcatggcttataacaaagccaaagcggaaagacaatggttccgctggaaagaagctgaagaaaaagaactcagaaagctcggcgtggacgaggacaccatccagcgcctgcatacatacgattgggcacagttcaataaagaacgccaatacctgcagcgccaggtggaatggtcgccctttgtagatctcatatctgcacaggctattgaattgcccgtagaaaatacgcaagccctgctggatagtattgagaacgcgaagctgctgcgtattctctccaaagaggacaaacttaccttacagatcatcctgtataaactacaggactacaccagtatagagatcgcgaaaaaaattggactgacggaaacagcagtccggcagcgtatctcccgcctgaaaaagaagtttttctcctaatttcatgtcacgatccggcctttttcctgggctataggatgaacggggaaaaagacgttcacttgtagcttgaaaaatgaacaccagccatgcgggtacgttcccgcctgagcgagcgactgaaaagtccgcagtatgcgggcttcggaaaaagcgctaggacaagcccagccgcaagctgcctatcttctttgagacggcagcttgcgttgtttggctttgagcgattcattttgaccggaaagagggcgtagttgccctttttgccacaacctcgggcgggagattatgatacacgctatcgtttgcccacacgtcagatgggctggccgaccttgggttgtaatcagcaagacccctggagagccagtgaacggcttgtaaactgcaagcctgcccgcatggttcccaagaggttgccggggggcgagctgcaaatacggcgcatcaaaatccactactttattcagattgccgttgacggcgaatccgtgcggcgcagaaaatctgcgccgcattagtttgccgccaacaggccaaggagaatgtgccgaaatgaacggatcaatttcaaaagagcagacctacagggagatagaacggatcttccgaacgcttctgccccaaaacgggctggctgtgcgggaagaacaaatcgccctctgctacaccatgatggacaccctgtttcaaaacaatatcgtcctttgcgatgcaggcgtcgggatcggcaaaacctatgcctatctgaccgcctgcattttgctgaaaaaattcgcgccccatgcgcctgccggttcccagtccgtggtggtctccacctccagcgtcgccttgcaggacgctatcattggagaatacattccatttttatcccggatttttctagagaaccgcatcatctccaagcccatccgggcaatggtgcgaaaaggcaaggaacgctttgtctgcgacgcccgtctttcccagcgcttggaagctgtgaaagataagaaaaagaatgcggaacagatggaggctctgctctccttgcgcacccattacgacttggactccgttgccggcctcagcggatttgatcggcgacaggtatgcgtcccaaaagtctgtgaaaaaacttgccctttgagaagtacctgccgataccaccaatacctgaaagaagccagaagtgcggaaatttccatccagatctgcaaccacaactatctgctagccgacgccgcccaccgtttgcaggaaatgcgtcctcttctcaacgattaccgggccctggtgattgacgaggcccacaagctgccggacgccgcccgtcagatgtacggaaagagcctgtcgacggaagactttcatgaactctgcacgctgctgataaaagaaaagcacacccttgcggcccagcggctgaaagaaaagtttgacgccctcgtacaggctatgtgccggggcgaactgctggaagatgcgcagcgcactgcatttgtcctaacgccggaacgggaagcatcccttcgggcttgtctctctttcctccggcagcttcagaaacagctggccctgcatcttccccggtggatcctttaccggctgggaacgacggaacaggttctcaacctctttttcaccggagatcgcaaatacattctctacatccaatacgatcggaacggaatccccagtctgtgcgctgccagccgggagatgtcggaacttctgtccaaggcgctgtggatgaaatccacacccgccattttgacttccggcaccctcatggccggcggcagctttgacaggacccggcagcttatggggctgtccgcaaaccagcgactggaagatttcgtcgcggtttcgcctttcaattatgaagaaaactgcctgttatactttcccgaagaccagccgaaattgtcaatgggcagtgaacaggaagtcaagtatctggcggagcagatctgtaggttaatagaaactacctacggccacacgctggtgctttttacctcttattctctgatgagcgctgtctacaatcaggtgaaggagcaattgtccttcccgcttatggaagtatggcggcacgcgcaggacgtcatccaccagtttaagcaagcgccaaacaccgtgctgttcgcagcaggctcctgttgggaaggtgtggattttcccggcgacatggtgtcttcgctgatcatcgtgcgtctgcccttccctgttcccgatccattgagcgaagcggagcgggagcggtatcccaccttacaggactacatccggacggtagtcataccggatatgcaggtaaaacttcggcagggattcggtcgggccattcgcaccgagacagatacatgcgtggtaagcattctggactatcgggcagcccccggagagcggtatcaccgcgctgtactggacgccctgccagacctacggatcaccggaaaaatcgaagacgtagaagaattcatccgagcaaagaaaggcccggattattttatgccgtaaatggaggttgaattgatgcgtgttccttatttccctgaagctccgtcccttgccgtgatcaacgaaatcaaatattatatggtactgtcagtcttaaaaaagatgttagccgacggcgtcattacatctgaaaactacaagggatccactgttgctattgctgagaaataccgagtttcaagatacgatatttagtggccattgtgatggctttataccggtagatgtggtagtgttgttgctacagggcggtcgcaataaacgtcgcctaagaaaatacagaaaggatggtgcagagaatgccgcaggtgcaaatcatagaacccaccataaaaccgcaagagcaaaaaatccgggtttgtgcttatgcccgtgtgagcagtgactctgacgaccaactcaattccttttctgcacaagtagaatactttacccaactcatacaatcccatagtgattgggaattcgtagacatttatgcagacgagggcattaccggcactagggccgacaagcgcaacgattttcaacggctgatgcgagactgtcaatctgggaggatcgactgtatattggtcaaatcagtttcccgatttgctcgaaacagtacagattgcattaaggctgtacgggaactgcaggcactcggaatctctgtgattttcgagaaagagcagatcaatacaggggcactaaccaatgagatgttcctgagcatgatgagcgcctttgcgcaagaagaagcaatttctatctcccaaaatatgcgtagaggcgccgtcatgagaatgaagaatggcaccttccgcctatcgcaaatcccatatggataccgatacgatgaacacggagttctgactatccaatcggaagaagctgagaccgtgcgttggatttacagcagttttctatccggcgtcggcattcaaaccatatcccaccagctgggagcaaaacagattcctaaactgagtgggaaacctgtttggagcaaacacggcatcctgtatattttaacaaatgagcgttatacaggaagcgaattgtttcgcaaaagctaccgcactgaaagcatccccttcagaaagatcaataatcacggtgagaaaactcaattttatgcggaaaacacccatgaacctattatcaacaaggaaaccttcgaaaaagtacaggctttactgaaagaaaaaaaggaaaaacatggcaaaaagcagtctactaaagattttcctctaacaaaaatggttttctgtgaagaatgcggatcggtttgttatcgaagaattacttcgcaggggattatgtggacgtgttccaaccatttagccgacctttcccgatgcagtacaaagggtatattagaggacacaatatataaagcctttctttccttaaccaacaagctggaacaaaaccaaagtgaaattctggaaacatttctgctccaaatacagaaattgagagatcgggaatatatggctcatcccggagtcataaaattgaaccaagagattgccgaattactaaagcagaatcatacactggctaccttaagagccaaagagtacattgattctgctttttttatatcccaaaccaatgaacttgatcagaagatttcatctttaagggcagagctaaaaagatatcgtgatttaaacgactatcaggaattgatccgtggaacgcaagccgtattagagacgttgagcaaaactacatccaattcctttcacccttctaccttgaaaaagatcatttccaagataattgccggtccaaaaagtttgaaatttcagttaatcaatagcttggaactgatagaacccatcgagaggtgacacctatggacaaaaagcgcaggttcccgtttggatatcatatgattgatggacagatagacttagatgcagcggaagcactggtcgtacggtttatttaccaaaaatattcagaaggtatttccgtaccaaaactaatggaacggctgcctgttctcaatgtgccttaccgggaaggaagcaattggaacaagaatatgatatgtcgtattttagataacgccacataccttggaaataatgaataccctcaaattatagaagaaagcctttttgaacaggtttcctctcggcgttcgatcatacaaaatggaaaattgaattcttcacttaaatccgtcagagagaaaatatgctgcataaaatgtggacaaaaactagcccgaagcactcatcacagcaaacagagcaaaagcatagtctggatttgtccaaactgcggaattgaaacaggcaacatcacagataacgaattgttggagcgaattctcggcgttttaaattttgtaattactcactctgcccaagtaacacagcctccccagacagtaaagtgtctctctctagaagccgctcgcttaacaaacgaaatcaatcgcaaaatgtgcgatccatatacttctacggattatctgttggagcttattaaaaagtgcgcccaagagaaatacagcactatgcagaaccaacctgtgggatggaaaaatgaactgctaaaaatagccttggacaaccgagtccccctagaatcgttggatgtccagctttttcaagaaatcgtaagtaaagtctttataacttcaaatgcaactgtcaccttacaactaatcaatcaaaaggttgtttaatataatagaaaggagccttaaatgcaatctcaaacgcctatccgacaaaaaagcatccgggaaattaagccctcatcggtactgcaggcccgaacacgaaatcacaggctgcgtgtagccgcttactgccgagtcagtacagagcaggaggaacaacaaaccagtatcgaaaaccaagtaatctattatgaggatctcattcgctcaaatcctgaatgggaatacgccggcgttttttcagacgatggcatcagcggcaccagggatgagaaccgccctggcttcatggaaatgatcaagcaatgcaaaaaagggaaaatcgacatgatacttgccaagtcactgtcccgtttttcccggaacaccctccaatgcatctcatacatacgaatgctaaaggaccggggtatcatcatccgttttgaaaaagaagggttggatacctctcgtgtgaccagcgaaatattcttcacatggacaagcgcctttgcccaaggggaaagcgaatccctgagcaacaacgtcaaatggggtaagcggaaagggtacagccaagggaggtttgcctttccatattcgagtatgctgggatataggaaggatgaggatggtgaaccggaaattgtgcccgaagaagcggaacacatcaaaatgattttcaacctgttcctgctgggccggagtctccgccagattaaagaagccctggagcggcggaatgtgctaaccccacgagggaataccgaatggagcctctcaagtattgagcatatcctgcggaatgaaaaatacatgggagatgttctcctgcaaaagacttatactgtggatttcttaaccaagaaaaagaagaaaaacaacggggaacttacccaatactacattacagataaccaccccgccattattccccgtgaggacttcttgaatgcccaacttgaactgacccgcagaaatagcaaaaagaaggtttcccaaaagaaaaccaagagtgtgctggggaaatactgcagcaaatatgctttatccgaaaggttggtctgtggggaatgcggttccatgtaccgacgaaccacttggtctaaaaagggcaagaaaaaggttgtctggcgttgcatcaaccgccttgagttcggcacaaagtattgccagcactctccgaccctatccgaggaagcattacatcaggcaattctccagtgcgttcaaaccatggccggtgacaagaatgatatcatgcaaagtctccgggatgttcaagagaatattatcctcttttccgggagccaagtcactcctcaatcactggaaaagcaaatcaacaagctggagcaggaaatgtccgccttagtcaagatcgtagcacaaggcggcgacagcgacttctatgccgccaagttacggcagctttccgaacaaaaaatgggccttaccaaccaactgcaggaaattcagaaaaagaagatggcggatcaggcacaggaataccagtaccaacaggccctgctttatatcaataacgaggaaaacctgaaccttactgaatttaacgatgacttcatccgaagaattattgaacaggtgactgttttatccgctacccaaatcagaatacggtttgtcggtgggtacgagcaggacgcaaacctgccattgaaaaaataggttgcctgcaaagaaatagcaccgatgtcctcaatcttggggcatcggtgctatttctttgtggaagatttgcatgtccaacagcgtccaaaaagcagttgacaaaattgccttaatgtgctatcatattttttatagtgaacagttgtgtccaaggagagtgccgatatgaaagcaaatttaataatcaatttagtaaccgcacacagtagcggaaatgaatctcaatttgaaagtgcactttctgatttgattcatgatgaagaaaaaaaaggaaatgcccaattggcattgtctcttaaaaatgcttattcgccagacaaacattttcaaagttccatgatcagcccaatgtctacaatgtctttttccgtacagtcagttaccaatttacccaaagacaaagatagcactttggatctggttgaaattttgcaacctaccgttcagctaaaagatgtagcactgtcggaaaaggctcaagatacaattcaggaaattgttgaagaacaaaataaagcccaagaactcatgaagataggaattacacctacaaatagaatattattctgtggccctcccggttgtggaaaaacaatgactgcaaatgccttggcaaaagaattagggttacctatcgcgtatgttcatttggatggtctggtatcatcgtatcttggccaaacaggaacaaatatccggaaaatattcgaatttgtaaaagggaaacgcattatgctatttctcgatgaattcgatgctatagcaaaaaaaagagatgattcccatgaactcggagaattgaagcgagtcgtaacaaccttgttgcagaacatggatgaaatgccggcaaatgtttttttggttgcggccaccaatcaccatcatttacttgatccagcgatttggagaagatttaatatttccattttgttagacgagcctaatgaaatgcaacgccagaaaataattgagaactcattgcaagattttttgaaagaatacaaaatagattctcaaatattgaccgttcttacggatggcatgagtggtgctcaaatgcaaacattcttacagtcattaggcaagttttgtattatgaataaaaaaagtggatcaattatttctattgaagaaatcggaaaaatctggctgaagcatactactttatacgttagtgaagatgacggtgactttatgaaggcattatcgaaacttcaaaagaatggagtatcgattcgtacacttgaggctatcacggggattcctcgttcaacattaagttatcgttttaacaaggagggaaaattagatgaatgacaaaaagcctcatttttggattcctgatgaggaagtagaacgtgtatcaaagaagcctactggtagaactacacctcgtgatattgtttattctgaacacggtgctaaattgagccatggacttcaattagttaagcaagccgtcgaagaacttaaagaagatgactccttacatgatgctggattatacgtatttaaagttgagctgccagagggcgaaaaaattcagcatcagtctgatttgttttccaagaatggaatgtacgtaaatgcagttaaggatgagcgacacgcaatagtctctacaacgaaacatcagttccagatattaaggaatcgtgttgcagcatatacggcaaatggcacaaataaaactcaatttgactatatagaaagtattgctccatatataggaacagagaagaattccggagagctaagaaaaaaagtatatattgatcggcctccagaaacagtagatattcaacttatgtttattcctaatttgcaatctaaggactatgcaatagcaattgaaaaggtgaaagaaaaaattcacattgtgcagggacaaattcagcaggacccctattacctctctgatagaacgcctgtaattcgtgcggttgttccatctagcactttaagccgttttgagaatgactctgcaatatatagaattgaggagacccgtttttttagtgtaggtgtagatgattttctgatgaatattccatcttctgcacaaatggatgatgaaattgatttagaaaatctgccaattgtcgttgttcttgactccgggataaactttccttctccgtttgatcaacttgtaatcgaacattggatgcctcccctatctcctgggggcgatagagatcacggaacacgagtagcgagtagagtatcatttgcacatatgggacaacaattggcactttctcattgcattactccccgcgcaagagttattgattgcaatatacttgatggttctgttccagaaaatatcataatccagcgtattcaaaaggctgttgaggcttatcatggggtttcgaagatatacaacttatctgcaaatgcgagtcttcctattgaaggtgatgagatgagtattataggatttgaacttgatgcattgcagctgaaatatggggtccagtttgttgtttctgccggaaatcatgaactttggaaaacggaaacttccattgacgatatactagatgatgatgattcgcgaattgctccccctgccgattctatgctcagtatcgtagtaggagcagttacaagcgaggatcatgttggtagtctttctgggaaaaatattattgctccatacagtagacgagggccaggttttgctggtttttcaaagcccgatatgtgtgcttatggtggtactatatcattagatggggcgggtgcccatgtgcctgctgatatggcctcgttagttcttaccacaaatgcaactgtggaaccagatgcaggaactagttttaccgctcctactgttgccggtgatttagcggaaatatgtaacaatactcctaataatgatattttgcttgcaaaagctctgctgtatcacaatgcaaagcctctatgggaaagtgatgagatggaaaatgaagaattagcctttgcccataacctttatggaagaggaattgcttcggtggaggatagcaaattctcatctccttctcgagtaactttcttaaggacaggaagccttaacagactaaccaaggaacgcgtgaaaatctatatgccagaagttttagctgctcaggtaggcagaaatgtagctcgcgttactgtcacttgtcttacgctaccaccggttgatcgcacaaagggtagcgaatatttaggagcgtttattcgagcctcactaaaaaagtctcatccagatggccgtttgttgccggtagcacaagactattctgaaggccgaaggaaatgggatgtctgttgtcaattcactaaaacatttacgtcgtttaattctggtgactggcaaatatggctggaacttttctctcgttgggatgaggaaaatttagatgttccatacgcactggttgctactattgaagatgttagcggtactttagatgtgtatagtgaaattcaagcacaaaatcgttatcagctggcaaatactttgcgtataaaaattgacgcataaaagactttgattgaagtatttgaaggcggcatctaaagtgtccaccccttccaaaggaaaaacctcattcaaacgaatgaggtttttcctttggagtgaaataaatctcttcgagatttgtgaaatgtgcttcgcacgtaaaaaaacaaccttcggttgttgtgaaatgcctgcgggcgtgaggagatttatttcatttcatattgcggcgaagacgcaatatatcacaatgcacagcacacttgtgtgcgaagcgttatttcacattttgtgtcagcaaaatatttcactaaaaacaaaccggtggcaactgcccagccccgaccgagccggcaggtgagaacgtagggagattatggtgaaatctgccttacggcaagtgaactgttcgctccgtgaacgttaaaaccccgattccgcacattaaacggatcggggttttgttctgtacttataaatctctgtatttctttacgcggcggacttttttgtttttacggttcatcaggatggcaaggatagcatacgcggcagccaagaccagcaaaatggtggccgtaacgataaaccacgtggaggtgagcacctcctgcccctgctgcaaaacctgcacgatctcgctgcgctccacgctttccgcggcgacgagcgcaacggtggcaagctccgcgccgttataatagaatgtggcggtaccgacgtaatcgccctttttgatgggcgctttcacgctttcgggcagatcgagctttgtggtgatggcgccgctttccagactgctcggcagtgttgcggtgagattgccctgcgccagcacctgcaggcggtctttgtcccacgcgtatttgaggttcacctcgccgagaagctcgccatccgtaacgagcgttttgttttcgatattcaaaaatgcccagcggaacagcgtcgcggcatcgtacatttcgccgtgataatcgatatggttgccctcgctatcgatatacgggctgcccatgcaaacgacaaggtaactgtacccgtcatacgtagccgtggcggaaatgcagtagccggattcattcaaggagccggtctttacgccggtggcataggtgtaatactcatcgtcatagctcaaaagcatacggttcgtcgtggtgacggtgcgttcctcgcttgtcatgttcgtcggcggctgcgtgtaagacgtctgcgaggtgacgtccgtaaaatacggcattgtcagcgcatactccgtgatggtcgccatctcgcgcgcggtggtgtagtggttttcatcatacaggccgtgcgggttcacaaaatgcgtgttcgtgcagccgagctccgcggccttcttgttcatcagctccacacagctcattttgccgtcaccgtcttcgtcatactgcgggtcgtcggccgtgatattcaaagaatccacatattttgcaagcgtcagcgcggcatcattgccggagggcaccatcatcaggttcaaaagctcatagatggtaaagctttcgcccgtttgaatttccgccaaagacgagcccgtgccctcaagctcctcggcaacgctttccggcaccgtagtgcgcgtgttttgcaggtcgctgaccgtttccgccgtgacgatatacgtcatgatcttcgtcatggaagccatggggcggcgctcgtccggattatatgtatagacaacggtatcggtgtcgaggctcaccatatagatagaagcgctgtttgggtctgcgagcttatcgcacggaaagcccatttcgctgcttttggccacgaccgtgtttgtcgttgtgtcggtttccgaagtcgaggtatcggaagctgtggaattttcgctcgcggtgctttcggctgtatcggccaaaacgccggtcgtcaaaacggaaagcgacagcaaaacgcttgcgcatatcgataaaaatttatattttctcactgtttatcctccaacggacatgatataatactgttaactattttattattatagcacggtttggcacccctgaaaaggtgctcgccggtaaattcagaaaaaagtcagattgaaaatttaaaaggagacgctatgcagcttttacatattgcagacctgcacttcggcaggcttttgtacgctcgcagcttaatggatgaccagcggcattttgtgcggcagtcgcttttgcctgcgctggatgaatataagcccgatgcgctgctcattgcgggcgatctgtacgaccggcagattgcctcggtcgacgcgattcatttattcgacgagctcatcgatgcgctgtgcgaacggagcatccccgccgtcatcatttccggcaaccacgacagcccggaccgcattgcggtgggcaaaagcctgcttgcgcggcacggcatccatatcatcacggagcttaaagacgcgtttacgccggtcgagatcggcaacatacagattttcccgctgccgtactttgaaaacgcccagatgcgcgattttttaggcgatgaaacgctgcgcggcgcgggggcctgtatgcgcgcggcgatggaaaaaatggagaaagcgtttgaccccgcgaaaaaacacgttttggtcgcgcactgctttgcggcgggggcctccacctccgattccgaaagccgcctttttgtcggcggcgcgggcgatgtgccgacggatgtcttctccccgtttgactatgcggcgctcgggcacctgcacgcggcgcaaagggcaggcgacacggcgcgctacgcaggctcaccgctcaaatattccgtagacgaagcgcaccagaaaaagagcatgacgctcgtcacgctcggcgacacggtggaaacaacgtgcatccccgtaacccctctgcacgacgtaaagcgcatagagggtacgtttgcggcgctgctcgaaaacgggcaggcggcgcccaatgaagactatgtggaaattctgctcaccgacgacgagccggttttccgcccggccgaccgactgcgcccctattacccgaatgtactcggcgtgcgcagcacgtggtttttaaagcaacacgcaggcacgcaggcggaagccgatctgcacagccgcagccgcgcggagcttttccgcggctttttaaaggaggtctgcggtgaagaagcgcagccggaggacgaagcgctgcttgcggaaattctaaaggaactggagggcgatgcaacgtgagaccgatccgtttggagctttcggcgtttgggccgtatctggagcacaccgtcatcgattttgaaaagctgaacgaagcggggctgttcctcatcaccggacagacgggcggcggcaaaacgacgctgctcgacgccatgagcatcgcgctcttttataaatcgacgggcgggcggcgcacgtttcaagatatgcgctgccttgccgccgcagacagcgaccgcaccgaggtcgtctatcattttgcgctcggcgaagacgaatattgcttccgccgcgcgctgtaccgccgcaaaaagcgcggcagcgacaattttatcaccgaggaagaaaacgagtgcaagcgccgcacggcagacggctgggcgcttgccgcttcgggcgcggcgcgcaatgtgacaggctacgcggaaaacctgctttccctcaccgccgagcaattttcgcaggtcatcgtgctgccgcagggcaaattcatgcagcttctgcgcgcgaattctaccgaaaaagcagccattttgaaaacgcttttctcctgcgagctatgggaacgcatcgcgatgaaattcacggagcggcaaaaaaagctgtacgcaaagcgcgaaacatgcgagacaaaactgaaatcgctgctcgaaaagcatggcgcggagaccgccgaggcgctcgccatgcaaacggaagcgcttcgatccgaatgtgcacggaccgaaaaagcgctcgccgccgcgaaagaagcactgactctcgcgcaaaagcaatacacccgtgcactgcaatttgagcagtgccaaaaagccgagaccgatgccgaagcgcagctgaaaaccgccgaaacgcgggcagcttccgccaaagcgcagtatacgcgcgccgagcagaaccgcgcgggacttacaaagctgaccgccgaaaaggatacgcttttaaaacgaagcgaacagctgcgtgcggagcaggaacgcagcctgcaaaaggagcagcttttaaaagaactgcgcgccgaggaggaacgcgagcgcgtcgtgcagaagcaggcagaggacgaccgccaaaagctgccggaggtgctgcggcgcatcgcggtaggcgaagcattcaccgaaaaggccgatgccgcaaaagaccggctcgcgtcgctcttacagacgcagaccatcttaagcgaacagcttgccgcgctgaaaacgcgcagtgacgccgtcaaagccgaagcgcagtgcaaaaaattgtggagagctgccgaagacgcggcgcgcaccgcgcgtctgaccgtcgtggggcaggataagctgctctcggcggcagaagccaagtggaaccaaaacagcgccgccgcgctcgccacagggctcgcggacggcacgccctgccccgtttgcggcgcagtgcaccaccccgtgctcgccgtaccgtgcgcaggtgagacgacaaaagaagaacttgatgcgctgcgcaaaaagcttgaagacctgcggcaagagcaaagccgcgccgagcagacggccgccgccgcaaaagcgcggcacgaggtcgcttttgcgcaattaaacgccgcaaacgatgccgcaaaaagcatcacagaaagcgaagaagtgctcacagcggcctacattgcggcgcaaacggcgctcaacgaagcgcaaaagcttgcagcgcaggcgccggccgcacacaagaaacttgagacactcaaagcggaacgcgaagcgcttatgcaggtcgaaagccgccacaacgccgcgcttgccgcctgccgcgccgctttggaagaaaaacgccgccaattaagcgccatggacaccgtacgcgatgcggcgcaaatcaccttggagatgaccgaaatacaaaagcgcattcgcgtgctcgagcaggagactgcagcgcttgaggaagcgttccacgctgcggaaaacgcgctttctgccgcaaacgaggccgtaaaagctgccgcacagcagatgttcgccgcaaaggaagcgaaaaatgccctcggcacagcgccggaaaaggacctcccgcaaagcaaagcggagctggacgcaaaaagcaccgaaacgcagacgctttccgtgcagcttgggcgctttggctccgacctgcgcaccattgcggaaagcgccgccgccgtgcagcaatacacggaggaagccgccgcgctcgacgtacagtacagccgcgcagcaaagcttgcggggtacgtgaccggccgcagcaacgccttgcgcgtgccgcttttgcagtacgtgctcggcatgatgctcgacgagaccatccagagcgcaaaccgctttttctccgttttaagccgcgggcgctacgccttgcagcacaagcagggcaaaagcggcgcgggctacggcgggcttgacattgaggttttggacggcatgagcggcacgtgccgctccgtagagacgctttcgggcggcgagcagtttttggcatccctttccctcgcgttcgggctttcggacgtcgtgcagagctactcgggcgcggtgcggcttgattccattttcatcgacgagggcttcggctcgctcgataccgacacgctcgataccgccatgcgtgcgctcgagagcatccgccaaagcgggcgcgtcgtcggtatcatctctcacgtttcggaactgcaaagccgcatcccgacgatgatccgcatttggaagaccgcttcgggctccgccgcagcaaaagtcatcgcggaagactgaaccgtttttgaacaaaatgaaaaaacagaaatgcaaattgcaaatccgcctttattatgctatactgaaagcaactaagcgcaggattttctgcgcggccatgcaatgctaaaagaaaggatcgcttccgggctccttcggaagcttcggtgaatgaatatggtaaagctttatgacggcggcgtttaccttgtgaacggcgcagagatcgtgccggaagccgctgcacccgagacctaccaaaaagacacggcaaaacagggtaccattgcctattccattttaaaagcgcacaacaccgcagaggatatgcagaacctgcgcttaaaatttgatgcgctcgcctcgcacgacatcacgttcgtcggcatcattcagacggcgcgcgcctccggcatggagaagttccccatcccctacgtgctcacaaactgccacaacagcttgtgcgccgtgggcggcaccatcaacgaggacgaccacgtgttcggcctttccgccgcgcgcaaatacggcggcatttatgtgcctccccacatggcggtcattcaccagtacatgcgcgaggccatggcgggctgcggcaaaatgattctcggctccgattcccacacgcgctacggtgcgctcggcaccatggccatcggcgaaggcggcggcgagctcgtcaagcagctgctcgaaaacacgtacgatgtcgcgtaccccggcgttgtggcggtgtacctcaccggcaagccgcgcccgggcgtgggcccgcaggacatcgcgcttgccatcatcggtgcggtgtttaaaaacggctacgtaaaaaacaaggtcatggagttcgtcggccccggcatcaagagcatgacaaccgattaccgcaacggcgtggacgtcatgacgaccgagaccacatgtctcacctccgtctggtgcacagacgacgacacgaaggcgtaccttgcaaagcacggccgcgcggacgattaccgcgcgttaaagccggccgacgtgacatactacgacggcttggtctatgtagacctttccaccgtaaagccgatgatcgcgctgccattccacccgagcaacgcgtttgagattgacgagctgaacgcgaatctcggcgacatcctgcgcgaagtagaaaaggaagccgcgcgcttgacggaaggcaaggatatcgaattcagtctgacggataagatcaccccaaggggtttgcaggtgcagcagggcatcattgcgggctgcgcgggcggcacatatacgaacgtcatggcggcggcgcacatcttaaagggcgcgcagtgcggtcagggcgaattcacactggacgtctacccgtcctcacagccggtgtttatggacctgctcgcaaagggcgccatttccgacctcatggcgacgggcgccatcgtgaagaccgcattctgcggcccgtgcttcggcgcaggcgatacaccggcgaataacgcgctgagcatccgccacgccacacgcaacttcccgaaccgcgaaggctccaagccgggcgcaggccaactgagcgccgtcgcactcatggacgcacgttctatcgcggcaacggcggcaaacggcggcattttgacctccgccgaaaagtacgcggacgactacgaagtgccggaatacaactacgatgattcctcctaccgcgcccgcatttacaacggcttcggcaaggcagagccggaggataagctcatctacggcccgaacatcaaggattggccggagcaggaggcacttgcgcagaacattctgctgcgcgtctgctcgaagatcatggataaggtcacaacgaccgacgaattgatcccgtccggcgaaacgtcttcgtaccgctccaacccactggggcttgcggagttcacactctcccgccgcgaccccggttacgtgcagcgtgcaaaggatgtccgtgcactcgaaaaagcgagacttgcgggcgaagcacaaagcgatgaagctctgaaaaacgcactcgggaaagtgaaaaacatcctgcccgacgtcgatgaaaagacaatcgaaatcggcagtgtcatttactgcgtgaagcccggtgacggctctgcgcgcgagcaggcggcaagctgccagcgcgtcttgggcggccttgcgaatatctgctccgagtacgccaccaagcgttaccgctccaacgtgatgaactggggcatgctgccgttccagatgaagaatgaacccgccttcgagatcggtgattatatcctcgtcccaaatgttttggacgccatggacggcgatatgcagagcattaaagcgtatgtgctcggcgatgaagtaaaggagatcgagctttacattgccccgatgacggaagacgaaaagaagatcgtcaaagccggctgcctcatcaattttaaccgcaagaattaaagtaaagcataagaaaacggcgagtcctgttcaggatttcgccgtttttgtatgcatttttcgtcttcatagagaagcgacgcaaaaagtttttgatcgaccttttttcaaatgaaggtcaaaccgaacctatggttcggtcgcgggttcttagggcagcgccctaagttgtcgtccgcagacgacgaaatctatttgccttccaaaaaatcaggacgggagagggaacagtccagtggactattccctcgtgggagacccaatcagggggtctcccaaaggacggcaatacgccgcccttcttattataaccgctcggcttttctcgccttattgcttgctcttaaaaaacgcaataaaccggttccagtcctcgcggctgaaatagtgcagaccggggcggcgatgatagccgatgcggcccgcgtgcaggttaaaatcgtagtcttccgacgtttcttcatagggaaatgcctccttgtcccccgctgccgccgcatagcagctcaaaagctcggacgcggggtctgcccagtcgtcgcccgccgcagacgccacatatacatagcgcggcgcaatgctcgcgagcaagtagtgctggtcaaacggcagcgcgtccgttttgccgacatactgcccgaacgattcgctgaaccagaacggaaactgcctataaatatcgtcaagctgctcgccttttttgccgcggaacagcgccgcaccggcacagccggaatcgttcgagtagccaaacgcgaagcgggtatccagcgcagcagtgagcagtgccgttttgccgaggcgcgaatgcccgcacacaacggactttgcgcagtccagcctctcgtcgtgctcggcgtaatccatgcagcgcatcgccgcccacgcccacagtgcgattttacccgcgtcatgcggcgcgcgtttgccgttttcatacagaacacccgcaaggccggaggtgaagtcgccgtcgtcgcgcgtcacatcctcatagccgaacgaaagcaccgcaaagccgttgtcgatgagctcctccgtcggcatgtagcggtccggcacatcgcttctgaaattgatgtggacaaaaaacgggtgcggcccctctgcggtcggcacagccaaatacaccgggaacacgaaatctttgccgtttaccacaacgcgaaacgtcagcttttccagcgtcgccttgcccgcgcagaaattatccgcaacgccgggctccgcttcccaaacgaacgattccggcgccttcggcaagcagccgtattcctcccgctgcaaaagctccagcatctccgcgcgcgattttaaactcggcacattcctctttttcagttcatccaaaaacatacaaacgccccctttatgcggttattgtagccgtccttttaggcgtttgtcaatcttcaaaaccaccaaaaaagctgccctctctttgtcagagaagacagcttcgttttgttttacaggcgttttacgcgctttcctctgcgtgctcgaactgactgttgtagaggttggcgtagaagccgttttttgcgagcaattcttcatgcgtgccctgctccacgatgtcgccgtccttcatgcagaggatgaggtcagcattgcggattgtagagaggcggtgcgcgatgatgaagcttgtgcggccgcgcatcaggttatccatcgcagtctggatggaaagctcggtgcgcgtatcgacggagcttgtcgcttcgtcaaggatcatgatgcggctgtcggacaaaatcgcacgggcgatggtgagcagctgcttttgtccctgcgagacattcgtcgcttcttcattgaggatcgtgttgtagccgtccggcagtgtgcgcacaaagtggtcaacctgcgccgcttttgccgcctgaatgacctcctcgtccgtcgcgtccaagcggccgtaacggatgttctccataatggtgccgctgtaaagccacgtgtcctgcagaaccatgccgaattcttttctgaggtcgccgcgggcaaactccgtgatgtccttgccgtcaaggcagatcctgccggatttaaggtcgtggaagcgcatgagaagctttaccatagtcgttttgcctgcacccgtcgggccgacaatagcgatcttctggcctgctttcacatcggcggagaaatcgtggatgacagtctcatcggtgtcttcgtagccgaagcaaacgtggtcaaagcgaatgtcgccgcggatattgctgttttccacggtgtatttcggtgttttttcgacgatctcgggttcatcaaggaaattgaaaatgcgctctgccgccgccatagtgcgctgtacctgacttgagatgcttgccatctgggtgatgggctgcgtgaaactgcgcagatactggatgaacgcctgaatgccaccgatagtcatgctgccgcctgccgccatagatgcgcccaaaatgcacaccacaacgtagccgaggttgcccacaaagcccatgatcggctgcatcaggccggagaggaactccgacttccagcccgcgttatagagcttttcgttttcgcactcgaatttctccatggagcgcgcttcgccgttaaacgctttcacgacgacgtgcccgccgtacatttcctccacgtggccgttcaccgcgccgaggtattcctgctggccgacgaaatatttctgcgaggatttcacaatgcgtccgacaagcagcaacgaaatcggaacgatgcacagtgcgacaagcgtcaactgccagctgatggaaagcatcataataagcacgccgatgatggagcacaccgacgtgataagctgcgtgatactctggttaagactctggctgagcgtatcaacatcgttcgtgatgcgggaaagcacatcaccctgactcgttttgtgaaaatacgagacgggcaggcggtcgattttctccataatggcacggcgcatgttgtacgagaccttcgccgaaacgccggacatcgtaaagccctgaatgtaggagaacagcgcgctcaacgcatataaccccacaaggaacagtaaaactttcgcgatatagccaaagtcaatgccctccgcagcgccggtgatgatgcgcatcaagccggccgtcagctcatcggtcgcttttgcgaggatcttcgggccgacgatcgtgaacacggtggaaagcgccgcgaaaatgacgacgatgagtattttaaacttaaacggggaaagatacgaaataagctttttaaagctgcctttgaagtccttggctttttcggtgggcatcatgcctctgccgggcccgtgcggacgcggtgcgtttcttttcggttcgctcatgccaattcctcctttgaaagctgactttccgcaatctcgcggtattccgggcacgttttcaaaagttctttgtgcgtgcccttgccgacgattttgccttcatccagcacaatgatctgctcggcgttcatgatggtggaaacgcgctgcgcgacgatgagcacgacagcgttttccgtgtatttcgtcagcgcacggcgcagctttgcatccgttttgaaatcgagcgcggagaagctatcatcgaaaatatacaccggcgcttttttcacgagcgcacgggcaatggcaaggcgctgcttctggccgccggaaacgttgctgccgccctgcgcgatggagctttccacgccgttcggcaattcgctgacaaattccatagcttgtgcgcaatcgagcgctgccagcacctcgttcacatcggcgtcttccttgccgtacttgatgttggaatcgattgtgccggagaacagcatggccttctgcggcacgtagccgatgttatcgcgcagttccttttgcgaaagcgtgcggatatccttgccgttcaggtaaactgcgccgccggtgacatcgtaaaaacgtgggatgaggttgatgagcgtcgattttcccgcacccgtcgcgccgataaacgccgtcgtttgaccgggctttgcggtaaacgaaatgtggctcaaggtatcttcctcggcgttgccgtagcggaaggaaacgtcgtcaaaacgcagctcaacgctttcattaccgagtgtaaccgggttttccggctctttgatggaaagctccgtcgtcagcacctcctgcacacggtctgcggaaaccatggcgcgcggcaccataatgaagatcatcgaaatcatcaggaacgacatgatgatctgcatcgtgtactggatatacgccatcatgtcgcctacctgcatggtggattccgcaatggcgtgcccacccacccacatgatgagcagcgtgacaagattcatgatgagcatcatgatcggcattgtaatgctcatcacgcgctgggtaaagcggtttgtgcgggtgaggtcttcattcgccttatcaaagcgcgcctcctcgaatttctcattcgtaaacgcgcgtaccacgagcatgccgctcaaattctcgcggctgacgaggtttaatctgtccgtcaaacgctgcaagctcttgaatttcggcattgcaacgtttaaaagtacgacgacaagccccagcaaaacgatgactgcgagcgcgatgatccagcttagcgaaacgcttttttgcagcgcgaaaataatgccgcccacgcccatgatcggcgcgtagcacatcaaacgcagacccatggaaataagcatctgcacctgcgtcacgtcgttcgtcgtgcgcgtgatgagcgatgcggtggaaaatttatcgaactccgtgttggagaagctttccaccttgcggaacacatcgctgcgcatctgctttgccacgccggacgaaatgcgcgacgcgaagaagccgacgagcatcgccgccagcacgccgagcagcgcaatgccgagcatctcgaggccctttatcacaatgtagcgcacctgctttgcgtccaaatcgacgccgagttccttatagaacagctttgtaaacgttgcgcccacctgcgagccgatcatcgactgcgcgttttcggctgaatcaatcgcttcgctgaacgtctctttcggcatctgctgtaacatggggataacagcataaagctgacgcatatccatgtcctgcacgccgctttcggtgtccaccgcctggccggtctgcgcgccgtaatccttcagaaacgtcatgaacgcatacgtcgctttaccgtaggcatcgcccaccgcctgcacgtctgcatcttcgcttaaagcgaccgcatccatgtccttgatattctcgtaggctttcgcaagactcgtctcttcatcgctgccgtgctccacgggcgtgtaggcgtttttgaacgtccccgcctccgcgtcgttcataaacagcgtcaataagtcaacggcctgttggttcaaaaccgcaggtgcagcctcatccacgccgccaagctgaatgccggtgttcacaatgtcgctcatcaggttcggtaatgtcaagtcacacatcgcctgcccgaaaagcagcagaatgcacgccagcaccagcgctgcaaacggctttaggtacgttttcagcaatttcattcggttttctcctttctcatctccgggtatctgcccgtctcggtaaagttttcaaggtttcgccgtatttgctccatgacgcggtggaagacccgcatgtcttccgggctgacaccggcgcacattttttcataatattcatgcttcagctctttgcaccgcttaacagccggctcggccttcggcaacaaaaccaaatgtaccatgcgacggtcgttttggtcaggttttgtttcaatccatccgccgcgcacaaggtggtctaccgccttactcatcaacgagcgcgaaacacccatgcgccgcgcaatgcgcccggccgtatcgacctttgttgtggaaaggcacatgatcacaccggattccaccgcggaaaggtcttcatccgccagcaccttgcgcagctccgtatggatgatgcgcgcgatctgcgttaagtgctccgcaagcccgtcgtgaaacggcacagccgtacacgcttgctcgtctcgcttcatttctcgcacctcctgttgcttactgctgaacatcgccaaaagttcttaacgatgtccatttccaaaaaacagtttaaaactgaattgttcatttttgaactgttaaggaatgaacatattatagtccgacaaaaacaaaaaagcaatgactattttgtgaacaaagatgccaaattatatttcagaaaaccatataaccgaaaagaaaaaagacccgcaaacacagcgaactgcatttgcggatcttgaatcaggcaattataaggtgaagtaaaaacttacttcagttcgacctcagcgccagcctcggtgagcttcgtcttaagagcctcagcgtcgtccttggaaacgccttccttaatggtcttcggagcctcgtcaaccatagccttagcttccttcaggcccaggccggtagcttccttaacaaccttgataacgttgatcttgtttgcgccagcagacttcagaacaacgtcgaactcggtcttctcttcagcagccggagcagcagcgccagcgccagcgaccataaccggagcagcagcggaaacgccgaactcctcttcgatagccttgaccagctcgttgagctcgagaacggtcatggacttgatttcttcaacaaactttgcgatatcagccattgtaatatcctcctaaaattttaaattgaaaattatcctgcaaacttatgcagtttcctgagcctttgcaacttcactaagtgcaatagcaagaccacgcgggccggatacgagaacgctaagcagcatctgaacaagaccttccttgctcgggagatctgcgattgcagcgatctctgccggagacatgaccttaccgtccatgtagccggacttaatcacgaacttaccgtcggaatcctttgcaaacttgttcaggattcttgccggagcgatctgatcctcgtgagaaacagccagagcggttgtgccttcgagaacctcggacataccctcgatctcggtgccttcgatagcacgcttgagaagagtattcttaacgacagtgtactcaacgccggcttcacgcagttccttacggagctttgtgtcggcctctgcagtgatacccttgtagtctacgacaacaccggatacgctgttagcgaccttatccttcagctgagcaacaattgcctgctttgtttccaaaacgcttttactgggcaaaatattcacctcgcctttcagttatgatttggaaaagcgccaaaatgaacgattttcctcggtgcgaaaactaaaaatgccttcctacttaccgcaggaaggcataaaaagtacaaagtaacttttccgctccctcggcaggcggtaaaacctttcagcccggaaaaccggtgcacctgctgtcttaggtaaacagctttgtaattatagcatggcagaagaattctgtcaagccttaaatttaagattcagactaatcttagccaaccttgttcgggttgatcttcacgcccgggcccatcgttgcagcaacaacgcaggaacggatgtactggcccttagcagcagccggctttgccttgttgatggcttccagcagcgtgttgaagttttccgtcagcttctctgtgccgaaggaaaccttgccgatcgggcagtggatgatgttggtcttgtcgagacgatactcgatcttaccggccttcgcttcggtgattgcacgtgcaatgtccggagcaacggtgccggccttcgggttcggcatgaggccgcgcgggccaaggatcttaccgagacggccaaccatacccatcatatccggggtcgtgatgaggacgtcaaaatccatccagccttcggactggatcttctggatcatatcattgccgccgacgaattcagcaccggctgcacgagcctcgtcttccttctccggcttgcagattgcgagcacgcggacggtcttgcccgtgccgtgcggcaggacgatagcaccgcggacctgctggtctgcatgacggccgtcaacgcccagctttacgtggacttcaacggtctcgtcgaactttgctgtaccagtcttgacacagaggtcaagcgcttcctgcgtatcataaaggcggctgcgctcgatgagctttgcgccatcgacatactttttaccgtgtttcattcatgttcctcctaaagtggtagatatcggattctcagagagtttcctcccacccgggtaaaatcaaatcaatcgactacttcgatgcccatgctgcgcgcagtaccggcgatcatgctcatagcactctcgatggatgcagcgttgagatcaggcattttctgctcggcgatcttctttacctgctcgcgggtaatctttgcgacctttgtcttgttcggtgtgcccgaagctgtttcgatgccgcaagccttcttaataagaactgctgcaggcggcgtctttgttacaaaggtaaaggaacggtctgcgtatactgtgatgacgaccgggatgataagaccagcgtcgcccttggtgcgctcgttaaattcctttgtaaatgccatgatgttaacaccgtgctgaccgagagccggaccaaccggtggtgccggggtagctttaccggcaggtatctggagcttaataaagcccgtaaccttctgagccatttgtttgcacctccaaaattcgtggttgatggcggaacgtccgtgaaaattcaggcgttcctcccacagggggacgtatccccctcaataaaaagcggattaccgcaatttaccgtgtgttattccaccggctctgcctggtcaagttccaggtcaaccggggtttcacgtccgaacatcgaaaccatgacgcgaatgtggttcttgtccacatcaatctcttccactgttccgataaagccctcaagcgggccgtcggtgatctggacgctgtcaccgacattgtaggagacttcgacattcctcgtctccacgccgagtcgctccacttcttcatccgtgagcggaatcggcttggaagacgggccgacgaagcccgtgcagccgcggatattgcgaaccgcgtaccacgattcatccgtgaggatcatctttacaatgacgtaacccggaaaaatcttgcgttccacttccttggtcttgccgtttgcggcaacttctgtgaccttttcggtgggtacgcgaatctcaaaaatcaaattctgtaaagagtggttttccaccgtcttctccagatttgacgcaaccttgttctcatacccggaataggtatgaaccacataccattttgcttcgtccgacatttcgattcctccgcttctcaaataaacgcgcgatcattcgcgctgcttatttcgccacttgcatgacgagacccagcaaattcatgaagacggtatccagcaggaaaatgaagagaccaagcaggatgatcgtcgcaagaacgacacccacatttttgaaaacgttcttcggcgtaggccaaacgatctttttgatctcgcccttgcagtcgcggaaaaactttcccgctttcttcgtaaagcgaacaaagccgttttctttttttgctttttcggccataacttcgttcctcgctttacttcgtctctctgtggagcgtgtgcttcttgcagaatctgcagtacttgttcatctcaagtctgtcgggatcattcttcttgttcttctttgtgttgtagttgcgctgtttgcattcagtgcaagctaaaacgacctttactctcatgacggcacctcccgttttacggaaaaaatttgggatgttctcccagcctccctcaaaatttgggcgcaaaaaaatagcccccaacttgaggtatacctataatagcataggatatacgccgctgtcaagagctattttgagattttatgcggtttttcagttgctcaggcgtgcctccacctttttgcccttcttcttttccttttcgggcttgatgttcttgccgatgagctttctggagtgcttatataccttttgcaggtcgcagccgtccgtaaagttcgcgatgatattccggatggccgcctcgtccttaatattattcagaacgccgaactgaataaccgcgcgggtgtccatatcacctgcggcgtacatgtcgcagaaaatggtgcacatgcgcttcatgggctcgctgtccttatagtttttcgcaagattctcgcacttcggcgcaaccttctcagcagcaaacagcgccgtgcgcacctgaccgtacacgatgcgttcctcgttcatttcgtcgcgcagctccgggaataccggcaccaagcggttgaggaagaactgcggatccgcgttgttttcttcgtccttcttgcggcgcttcttcgcggtctgcacgagctcgcggcgcttagagccctgcacgagctcaagaaagtcgttcgcgatgctctccgcgtcctgcatggtgttttcgccttcatcgaacagccacatggaaagctgacgccagtcgcccggctccttcggggtcttcattgtcgcgctgcgcagcacaaagcgccgctgcttcgtctcatagaaaaggccataagccacttcgcccgtcgtaaacatcacgccgcggccgttgtcggtctccagcaccacagcttcgccaaagccctgctcatttaacgctgcctgcaatttttcctgtatcagttcaaaagctttctgctccaagttatgatcactccgttacattagtaatttagagtatagcacagttttcgcgcattgtctatgaaaaatccatgaattcccggaacttatttttatcgaaacataaatccattgccatcgtgcattttatatgctaatatatgctcgtattgaaaatatgcgggctcggcccgcaacagaaatgaaggaaaacgattatgacagaacacggcggcgctgccgctttaaaacagaataacctcgccgctctgcgcagcgcgctgtaccacacggatttcgccacaaaaaaagagcttgccgagcagtgcaggttaagccttgcggcctgtacggcgctcctcggcgagatgatcgacgacggacaggtgttggagctcgcctttgccgcatcgaacggcggccgtcccgcgcgccgcttttccatcaacccaaactacgcgcacattttgtgcctgtataccgctaataacgacgtggaaaggagcggcatcgccctgcgcgtgtgcgatttaaaaggaaacagcttgcaggaaaaattctgcccgctcaacgacattctgccggaggacctcacactgttcatcacacagatggtgcaggcagatccgctcatccgcgcagtcggcatcggcatttccggcgtcaccgaccgcgaaggcgccattgaatcgcttgcgttcccggcgttaaacggcttcaacccgaagaaggtactcgaagaacagctcggcatcacggtcatcacggaaaacgacatgcacttcacgtcctacggcttttacgtgcgcaacccctgcgaccacccgtactccctttccgttctctactggccgagccaccgcagcgccggtgcgggcaccgtggtggacggacatatcatcgtcggcagtacaaaatatgcgggcgagctcatcagtctgccgctcatcaactccaccgctacaaaagtcgagaccgtctcgcgcatgattcacggcgagaatatcgtgccgctgatgcagaccgccgccgtgtgcaccattgcacttttgaacccggacatcctcttcctcaccggctctgccaccttgaacgtgcgcgaaaaagacatcatcgattactgcaagcagagcatcccggaaaaccacatgcccgttttccgtatgcaggcggacatccacgaggaatacatggccggtatcttctctctgacgcgtcaggctttgaaattcaaacattgagcctctttttgaaatgtacagacaacgctctttaaaatttcctaaatctcataaaaacttttctgctgcttttttgcaaaatgtttaaaaaggggctttacaaacggaagcgaatgtgataagataccttttgtcagaaagtgacgaaagtgtccgatccaaaagggatgaaggacaacggggagtttatacgggcgcgacacgctggggatttgcccacaccgcacccataaatgaagaagacaggacaaagcgttttcagatgcgctttgtcctgtttttcgttttacaaaatcatttctttacaatctgcgccgcttcgcgtgccagcgcctcgatggcgtcaaaatctccggcgtccaacagcttacccggtaccatccagctgccgccgcagcacagcacgttcggcagcgcaaggtactccgccgcgttctgcgcgctgataccgccggtgggcatgaatttcatgttgccgtaaggaccgctgagggccttcagcattttcacgccgcccacaacctccgccgggaacagcttcacaaaatcgagtcccatgcgcatgcaggcttccacctccgtcggtgtcgcgcagccggggatgaccggcacacggtgcgcaatgcaccagtgcacgacctccgggttcgtgcccggactgataatcgcggaagcacccgccttcacggcgcgctctgcggtctttacgttcaaaaccgtaccggcgcacacgcacacgtccggcacctctaccttaatacggcgaatggcttcctccgccgcgtctgtgcggaacgtcacctccgccgcgggcagcccgccttttttcagcgccagcgccagcggcactgctttttccgcatcgttgatctgaataacggggatgatcccgatcgattttaacgttttccgaaaattcatagaacaccctcccggtgattttcttcaatttattgtatcatgcgccgcaaaactttgcaatatatctccatttcaaaaaaattccgttttatttcaaattcgcgcttgacaaatgaaataacattcgatattttatcctcatcagctgaaccacacccgggaggaaactatggcaagaacaccgcgcatcacggcggaaatgctgcttgaggcaggcgccgccatcacactggaaaaaggcgcagatgcactcaatgtccgcagcgtcgccgctaaactcaattgctccgtgcagcccgttttccgcaacttcggcagcatggaaacattccgccgcgccgtcatcgaatatttagacggcacatatcaatccttcgtcgcgcagtacctcgataaatcggactacctgttcacgatcagccttgcgcacattctgctcgcccgcgatcggcgcaatctgttcggcgtcctgtttttatcgaacgaatacggcagccgcaccgtgccgcagatcatctcgagcccgtggaaccgtgaggccatcgactgcacggcggtgcagtacgggctcaccgtaaaggaagccgaagccgtttatcgcgacgtgcgattttatacattcggcatcgccgaagcgctgtacgcgggttcacttattgcggaggaaaatgaactgcggcagctgctgcgcggcgccatccgcaaattctgcgcaaaataacgcagtgttctcatttaaagaatttggagaaaaaacatggacatcaatgcacaaaacaaagaaaaatatttggaagacttaaaaaattggctccgcgagctcgaaagcgccccgcttgaagaaatgggcgcgtttttccgcaagcgcctgccggactacgaagcgcgcatgacaaaattctggggcgaagactacaagcagttcgcacgcgccgtgccgcaaagcgccaagcgcattttagacctcggctgcggcacgggtctggagctcgatgcgctctacaatttgcgcacggatatatccgtcaccggcattgacctttcgcccgatatgctcgatgtcctcatgaaaaagcatgggaataaggacctcacgctgctgtgcggcagctactttgccgtgccgttccccggtgcgttcgacgccgtcatctcgtttgaatcgctgcaccactttctgccggagaaaaagcgccagctcttcaaacgcatctatgactgtctcacgcccggcggcatgtttgtaaacggcgattacttcgcctgctgtgacgaagaagaaaacctgctgcgcgaaacgtggagccgcaaacgccgcaaagaaaacattcccgacgacacgttcgtccacttcgatatcccgctcacaaaagaacacgaagttgcactgttaaaagaagtcggcttcaccgtcacggtggaaaacggtaacgattgttcgattataaaagcggtgaaataacgcacagcgaagcgacgaataaagtttttgatccaacttttttcaaaaagttggcggggtctcggggcaaagccctgtggcgcgctccgcagagcgcgaaacccatttgcctaacctaaaaccaggaaggtaggcgcgaacttccagtggacgttcgctccgcaggaaacccagttgcatggggttcctgataggcggtcaaaagaccgcctatttaaaacgccgcacccacgctttcccgtgtgagtgcggcgttgctattcagtttacttttccgcgctcggtgcacttacgctgaagatcgcacctctaatgccgtccagcttcacggttgtgccggagcgcagcaggtcggtcgcgtgcgccgcgccgacgatggccggtttatccaacgccatggcggcgatggccgcgtgagagttcacgccgtccatttccgtcacaatacccgaagcctgacggatcagcggcatcgttgcgttcgtggtcttcggcagcaccagaatatcgcccctgcggaacttctgcagcgcttcctcctccgttttgcacacgcacagcgggccgcaggtactcagctcgttcacaacggtgccggagacgagcacgtcgcccacaaggtgtaccttcagcatgttcgtcgtgccggaaatgcccagcgggatacccgccgtgataacggcaatgtcgcccgcctgtacaagtccgtgttcctccgcaactgcaacaatgtgctcaaacagctcgtcggtgctggtcttttcctccagcatcacggggattacgccccaggaaaggcccatctgattcagtaccttgcggtcggtcgtgccgctgatgattgggcacgccgggcggaatttcgaaatcatgcgcgccgtaaagcctgttttcgatacggtcatgatggccaccgcaccgaggtcgtgcgccgtcgtgcacgttgcgtgcgaaatggcagaggtcacgtccttttgcaccggcacatcccactgctccagctgacgcacgtagtcgatgtcgttttcggtgcgctccgcaatgcggaccatcgtgcgcacggcctccaccgggtacgcgcctgcggccgtctcgccgctcagcataatggcgctcgtgccgtcgtagatcgcgttcgccacgtcggtcgcctccgcacgcgtcgggcgcggattcttgatcatggagtcgagcatctgcgtcgccgtaatgacctgcttgccggcgacatacgccttgtggatgagctgcttttgcagcaccgggatctcctccatcgggatctcgacgccaaggtcgccgcgcgccaccataatgccgtccgaaacgcggatgatgtcgtcgatgttctccacgccgtccgtgttctcaatcttcgcgatgatgcgaatgtcgcggcagttgtttttttcaagctcgttgcggatcatcacaatatcctctgccgagcgcgtaaacgaggcggcgataaactcaaaatcttccttcacgcagaattcaagatctgcgcggtctttttcgctgatatacggcatggaaagcgtcacgcccggcacattgatgcccttataagacgtgatgggtccgtcattcaaaaggcggcactcaatgtccgtgtctgtcaccttttccacgaccatttcaatgaggccgtcgtcgatgaggatatgcgagccgcggtgtacgtccttcggcaggtccttaaacgtgatagagcagccttccgcgtcgccggggcgctcgttcgtcgtcagtgtgtacttctgcccgtgggtcagcatcaccttttcggcaaacttccccgtgcggatctccgggcccttcgtgtcgagcagaatggcgaccggcacgtcaagctcttttcgcagctttttcaccatatcggcgcggcgcttgtgctcctcatgcgtgccgtgcgacatattcaggcgcgccacgttcatgccgctcaaaatcagctcgcgcagcacagcctcgtcatcggtagaaggacccagcgtacatacgatcttggtttttctcatctatatcgacccctttcattttcgcagaccccatggcctgcacatcagtgtgggctattttttcttattatagctgaaaaaagaaagggaagtcaatatgacggctaataattaaaaaagtaacaggctatttgttgaaaatgactcgctttttcacaccggaagtcatatttttcacttttgccgtgcgagaaagtatccttttctgcatttcgcagatcggcagaggcagcaaagcaaggattgccacgatgccccactgtgtcaaggtcagcggtacggagccaaacagcgccgctgcttgcggaaacacgaccacgcccgccatcaatgccgagcaaatcaaaaacgatacgttcagcccccggtttttgaacatgccgcgtcccaaaaccggccccgtactgcgcatattatagctgtgcacgagctgcgaaaggcttaggaccgcaaacgccatcgtgcgccccacggcgggctgcatgggatcggcgtcaaaaaacacgcgtcccaccgtgaacgccaaaagcgccagcgcgccgatcatcataccctccgccgccatcgcaaaaccgagtccgtttgaaaacgcactgctgtcccgcgcggtaggcgggcggcgcatcacgtcgccctgcggcgggtcactgcccagtgccagcgcaggcaaagagtccgtcacaaggttcacccataataattgcgccggcaaaagcggcgtcggcgtgcgcagcaaaaacgacacaagcaccaccaaaatctcgccgatgttgcacgacatcaaaaaatggatggtcttgcggatgttgccgtacaccgtccgcccctcccgcacggcggaaacaatcgtcgcaaagttgtcgtccgtcagcaccatgtcggcggcgtttttcgcgacctccgtgccgtttttgcccatcgcgcagccgatgtccgccgctttcagggcaggcgcgtcgttcacaccgtcgcccgtcatcgccgtgacgagcttcagcctgcgaaacgccttgataatgcgcattttgtgcgccggagagacccgcgcgtacacggaacacgtctgcaccgtctgcaaaagcgcgtcgtccgaaaggctctccagctccgtacccgtcatcacagctttattttcaatgccgagccgcccggcaatggctgaggccgtagcgggttggtcgccggtgatcatcaccgggcgaatgcccgcacgcttgcactcggaaaccgcctccgccgcctccgggcgcgggggatcttccagcccgataagtcccaaaaagcacagcccgctttccgccgcatcgtccgtctcggggcaagcttccgtgcgcttttccgctgccgccagaacacgcagcgcgtcgtttgccatgtcgcggttttttgcgctcagtgccgcccgcatctcgggtgttaacgtaacgttcttcccgtttaaaagcacatacgtgcagcgcggtaaaatcgcctccggcgcgccctttgtgatgaccctgtatccgccctccgttcgcagtacgactgtcatacggcggcgttctgccgtaaacggcacctcagccgctttcacgcgctgcttttgcagacgctcccagtccgataccgccgcgacaatcgccgtttcggtcgggtcaccgagcagcttctcgtcgctgccctccacgctcgtgcacagcgccgccgcagataacaaagcgtctctatcctgtccgttcagctcgcccgccgcgcccgcgcagcgcactaccgtcattttgttctgcgtcagcgtgccggttttgtcggagcaaatgacctcgcagctgccaagcgtctccacggcaggcaaatgccgaatgatggctcgctttgccgccatgcgccgcacgccgagcgccaagacgatcgtcaccacggcaggcaggccctcgggtatcgccgccaccgcaaggctgatggagatcatgaacatttcaagcggttctgccttttggataagcccgatcaaaaaaatcaccgcacatatcccaagcaccaaaagcccgatgagcttgcccgtgcgccgcagccgcagctttaacggcgtgtcgggtgtttcttcgtcgccgagcatcgccgcaatgcgacccatttcggtttgcatgcccgttgcggtcacaatgcccacgccctgcccggcagagatgcctgtgccggaaaacagcatgtttttgcgctccgccgcaccgcacatttcgtcacataccgcattcgcactcttgccgcttggcacggattcccccgtcagcgcgctttcctcggcctgcaaatgcatgctctccaaaagccgcagatcggcgggcactacgtctcccgcgcggatatatacgacgtcccccggcacgagtgcttcggcggaaatgaccgcgcgtttgccgtcccgcagcacatcggcgtgcggcgcagaaagcgtgcgcaacgcttccaacgcccgttctgccttcgcctcctgcaccgtgccgacgaacgcgttcgcaatgacgatgcccaaaatcagcagcgggtcggccagattcgcttccccctgcatgcacgagacggcaaacgacactgccgacgcgatgagcagaatgagcaccataaaatcgccgaactgcagcataaatttctttgcgaagcccgttttcttccccttttgcagccgattctcaccgtaaacgccgagccgctttttcgcttcggatccgctcagtccacgccccgcgtcgctttgaagggttttcacagccgcctccgccgtcatggcatagaattttgcttccgctatgggttttgacattttcctgcccccttttccggtaattctatgcgcgggcgcgttcgtttagaattttgaaagaattctttcatagaaatccactggcatttttagaaaaattgcagtatactataactcaatcaaagcattggaggtttactaagatgagttttcccggcatcccgtcgcttgacgccgccgtcatggcctttatacagacgcactttcataacaccgtgaccgatacggtcttccccatcatcacatcgctcggcgaagcaggcattgggtggatcgtcctttcgctcgttttgctctgctttaaaaaaacgcgccgcaccggcggtttggtgcttatcgccatgacggtcacgctgcttttcggcgagctgacgctgaaaaacatcatctgccgcctacgcccgtgcaacgtgttcacgaatttcccgatgctcatcgcgcgccccacgtcctattcgttcccctcgggccacacatcgtcaagctttgccgcagcgcttattttgacgctccgccacaaaaaagtcggctggctcgcatacattccggcagtgctcatcgcgttctcccgcatttttctttttgtccactaccctaccgatgtcctcgccggcatcctcctcggcaccctcgccgccctcctcacctactttgccgccaaggcgattcaaaaacgacaggcagagaagcgcacggcacaaatttgaaccgtttatttcgaccgataaaagcagcgcgcaggtttcacagcctacgcgctttttctatctctgttcagttctttcttgtcagttctttcttgtcaattcttccaacactttccgtacattatgcgcggcgtcttcctgaatctcaatgacctttgcaccggcgtgctttgctacgtcccgcaggtcgcacgcgatggcggtgtggtacgaacagccgatgacaaggaacacgtcgccgggctttaattcggccgtcctttcgtatgctttcgcatagttcggcgcggggtcaccgtacagcacgggcttattatgaagcgcccacgccttgtccatttcgtcgtcctccggcaggccgccgtgcagctccagtgcgtcgctgcccgcttttttatgcagcccgtcaatgttcatcgtgatgaccggcaccttgtattccgccagtgcaaaatgcgcatcgttcggctccgcgccgttcatattcgctttcaattcacgaatgacctcgttatacgcctcgtggtgatgctccgcgaacgtgcggaacagcttttcgcgcacgtcgggtcgttccataaatgtcggaatgttgctctgcttgctgatgcccgcgcccgtaaacgccagaattttcataaagaccgcctccttggctctcaatttaaaggaacggcgcagattttaagcctgcgccgttctttttatataaattcaattttactgcgctttgccgatctccaaggcttttctattgaaaccgagcatatccgcttttcttgcgggaatacacttttgcagcgctttatcgagcgtttcttccgtgcagaacgcaagctccttgcgcagcttaccgaccaagatgatgttcgcaaggcctttcagtccgttttcctccgccagttttgatgccgggacatagaaaacggtcacgtcgtcgcgctctacacgctcgtcgatgaggctgctgtcgagtaagatcgtgccgccgggctcgacctcgttcacgaacttatcgagtgacgggcggttcatggcgatgagcacgttcgggttcgtcacaagcggcgagccgatgggttcatcggagagacaaatgctgcaattcgcggtgccgccgcgcatttccgggccgtaggacggcagccaagagagctccctgccctcgatgaggcctgcatacgccacaactttaccggcgaacaaaatgccctgaccgccgaaaccggcaaaaacgatgttcaagtctttcatttcagcctgtccccctttgtgccgtctttatacacgccgagcgggtagtacggaaccatgttcttttcgagccaatcgagcgcctcaaccggcgacatgccccagtttgtcgggcaggtggaaagcacctctacaatggagtagcctttaccctcaatctggttctggaacgcctttttgattgccttttttgcgatattgacattcttcacgttatcgacggtcacgcgctgtgcaagcgccacgccgtccagtgtggagagcatttcgcagatgcgcaccgggtaacctgccgtgttgacatcacggccgtacggggtggtctgcgtgacctgattcggcagggatgtcggcgccatctggccgcccgtcatgccgtaaattgcattgtttacaaagataacggtgatgttttcgccgcgcgttgccgcgtggacggtctccgccgtaccgatggccgcaaggtcgccgtcgccctgataggtgaacacaacgtcctccggctttgcgcgcttgatgcccgttgcgaccgcttgggctctgccgtgcggcgcctgcaccatatcgcaggtgaaataatcgtagcacataacggagcagccgaccgaggccacgccgaccgttttgccgtcgatgccgagctcttctatcgcttccgcaacaaggcggtgaatgatgccgtgcgtgcagccggggcaataatgcagcggcgcgtctgttagcgtagacggctttttaaatacaactgccatttgattctatcctttcgccttatttcaaaagtttatcgatctcgcccagaatttccttcggggtaggaatcacaccgccggtgcggccgtagaagtgcaccggcacacggcactctgccgcaagacgcacatcgtctaccatctggcccatgctcatctccacaacgagcagctctttggtgtggtctgccgcgcgcttgatcgcgtccttcgggaacggccacagcgtgatgggacgaattaaaccgaccttcttgccggcttcacgcgccttatttacagcgctgcgcgccacacggctcgatgcgccgtaagcgacgacgatgacatctgcatcctccgtgcggtattcctccgcacgctgctctttttcttcgacgatcttatagcgctcgtagcgggcacgcacaaggtcttcaagagcgttcggcgtaaggtaaagggagttgatgatgttgtgctctcttttattttcatggccgcaggctgcccacggcttttcgggaagctttctgtctttgtgctccggcagctccaccggctccatcatctggcccagcatgccgtctgcaaggatcatcgcgggcatgcggtattcgtcggctttatcgaatgcgtcggaaacgaggtcgaccatttcctgcaccgtggacggcgcaaaaacgagaatctggaagtcaccgtggccgagggctttcgtcgcctgccagtaatcggactgtgagggctgaatgccgccgaggcccgggccgccgcgctgcacgttgatgatgagcgccggcaagtcggagcctgccatataggaaatgccttcgcccttaaggctgatgccgggcgagcttgaagacgtcatggcgcgcacgccggccgcagccgcccccagcaccatattgaccgccgcaatttccgattcagcctgcaaatatgtaccgccgatcttcggcatacgctttgccatataagccgcaagctctgtttgcggtgtgatgggatagccgaagaaatgatgacatcccgcctgaatagcggcttcggccagggcttcgttgcccttcatcaaaactttttctgccatagtttttaactcctctctcagcgttccaccgtgatcgccgaatccgggcacatggtcgcgcatgccgcacagcccacgcacgctgcctcatcggtcagctctgcgggatgatagcccttcgcgttcaaacgatccttcgcgagcgcgatgatctttttcggacacgcgtgaatgcacatggagcagcctttacatactttttcgtctacaatgatccttgccattcggtttcctcctttatcctactcggtttcgtcctcccagacgaaacgtacatatcgcttcaccgctttaaatccctctggcaacgtgttttccaccgcaaaatccggcacggtggaatagagaagcggcagatggcataattctgcggcttttttcgcaaacggcacagcatcaagcaccgtttgcatatcggtctgtacagcgaggtttgaattgttcacgaccgccgtcgctttcaggtgcgatgccgtttcgatctcccgaaggagcggaagcgtttcttccggctttgtggaaagcacacgataccggtttacgacgtacagcatctcgtacccggcagtctcgatttgccgatgcagctgcccgagcgccgtagcgcccacgtcgtcgccgcccgaatcgataaaaatatcggcgttctccatattaaagatggagaagatctccggcggcagcacaggggtatcgagcgttgtgttcgcgaacaccggcgcgatgagttccacgccgagttttttgagcagcgcggaataatccgacgagcggaaatacgggttcacgacgtccatatcgacaacaacgctgcgtctgccgcgctgcgccgcctctgctgccaaattcagcacgagattggtctttccgcagccgtaatgcccgcaaatgaccgtaatggagcttttcatgcgctcaccctttcttctataaataaagcggtccggtactcatcatcataccaccggaccgccaaaaaatcaacctttcccgccgacttcgccgctttattcataaatttttataagtcttacaaaatgtgggattcgtgaaaatcttctttcacttgcccggagggcaatttcacaaatccgccaggatttatttcattgaaaaaagacctttgtcaatcgacaaaggtctttttttggagcggacgacgaggctcgaactcgctacctccaccttggcaaggtggcgctctaccagatgagctacgtccgcatttcggatttcgtgtcacttgtttcgcaacgtgacttattataacggagatgatccgatttgtcaagcctatttttgaattttttccgacttttttcgtaaatgcttgcaatccgtgaaaaaactgctatactttatgcaatgattttcagcagcactgtgcgaatacggagctgctttctgttattttagaaggagttatgtttatgtattgtaaaacctgccgtcaaccgctgcctcacgatgcccgccgctgcccaaactgcggcgcacctattgaaaacaccgttttgcaaagcggcgcacgggatttcaccgccgactacgacccgcgcgacattcaggagaatcgcggctggggcattctttcctacctcggctttttggtactcatccccattttcgctgcgcgcaactcgtattttgcgcgtttccacgcaaaccaggggcttgtgctgtttcttttctacgcgtgctattcggtgctgacgcgcatcatcacgaacatcttaaacctcgcgctcggctttataccgtttgtgccgggcatgatctccgccgcgctgcaatttatcggcatcatcttctttgtgctgatgatcctcggcatcgcaaacgccgcttccggcaaagtaaaggagctgccgttcatcggccgtattcgccttttgaaataaccgtacatagcaaaattgccctgcgggattttctttcgcagggtatttttatacgcgaatttcgcaaaaccgttgcgcacaaagtcgatatatgctatactgcgtaaggaaaaattcagcgttcggcggattttaatcaagcggcaacgcgggggagcgcccgatttgccgtgccggactgctttcacatagcgatgggactccgtgtttcggattgagaggaagcaattgagcttcgaccgcccggcctgaatttacattcgggcgcgcttcgctatgtgcatttgtgcgcctcttttaaatatgggccggaaacgcttatattttagagaggtacaaaaaatgaaaagagaacacattctgaaaatggtcatgcttgcaatgctcgtcgccatcggcgtcgtcatttcgccgattttgcgcgtggagggcatgtgccccatggcgcatctcatcaacattgtctgctccgttttcctcggtccatggtattccctgctgtgcgccacgcttatcggcatcattcgtatgacgctgatgggcattccgccgcttgccttaaccggcgcggtgttcggcgcgtttctttccggcgtattttaccgtctttcgggcggcaagatcctttgcgcagtgctcggcgaagtgttcggcaccggcgtcatcggcgcgctggcttcttatccggtgatgacgtacctcgtcgggcgcgaggggttgacatgggctttttatattccgtcgttcatcggcggcacgctgatcggcggctccattgcgttcgtgttcctcatggcgctgcgccgcaacggactgcttgcaaaattccagcatgatttgggggcgaaggtctatgacaccacagctgcaaaacgcgctgctcaaagcacgaaatgatctgcgcgagacggcgccgctcatccactgcatcacgaatccgattgcgatcaacgactgcgcgaacgggatcctcgccgtgggcggaaagcctatcatggcggagcatcccgacgaggtggaggaaatcacgtgcatagcgggcgcgctcggcgtaaacatcggcaacatcacagacgcgcgccgcacctccgttttgacgagtgccaaggcggcgaaaacggccggtgtgccggtctcttttgacgcggtgggcgtgacgtgcagcgccctgcgccgcgacctgacgcacacgctgctgcgcgaggcctgtccggaaattttgaagggcaacgacgcggagattcgcgccattgcgggcgcgcattttgaaagtcgcggcatcgatgttttacggacgaacacggcggaaacgattgaaattgcaaaaatgctcgcctctaccctgcactgcgtggtgctcgtcaccggcaaaacggacattatcacaaacggcgaaacaactgagctgtgcgaaaacggcacaccacgcctgtcgctcgtcaccggtacgggctgcatggtacacgcgttgtgcgcgtcatacagcgccgtgacggatccgtttacggctgcggttttagctgtttccaccatgggcatttgcggtgagctggccgaacggaaatccgaggggctcgggtcgttccgcatcgcgcttttggacgcgctttcgctgctttcggacgatgattacacgcgtttattacagctgtgcgaagtttaaaagaaggagtttttctatgaaattcgatcctaccttataccttgtgaccgacagcaccggccgcacggacgatgactttctttccatcctcgaaagggcactcacgggcggtgtgacgctggtgcagctgcgcgaaaaagagcgcggcggcggtgaatacctgcgccttgcgcgcctcacaaaagctgtttgcggccgctaccgtgtgccgcttatcatcgacgaccgcgcggacatcgccatggcggcagatgcggcgggcgtacacgtaggtcaaagtgatctgcccgtctgtgaagcgagaaagcttttaggtgaagataaaatcgtcggcgcaacggcaaaaaccgtggagcaggcgcagaaagcgtaccgcgaaggcgcggactacctcggcacgggcgcgatcttcccgacgaccacgaaggtgaaaaccgtgctgacgccggtttcgcgtttgaacgatgtctgccgcagcgtgccgatcccggtcgtggccataggcggtttaaatgccgggaacatggatgttttgaatggcagtcccattgacggcatagcggtcgtttcggccatcatgaagagtgcagatcccgaagctgccgcgcgggagcttttcgcgcgcgtgcgggtgattaaagagaataaccgctgaaagtcatagaatgctacactttgtgctgatttcacaaactgaaacgacatttggcggtgaaatcttttccgaaatgacatacggtttttacgcgcggtttattgactctgcgttttaccggtagtatgataatggtagaagcaaaattccccataatttgcgtacaagccccttttcataaatccacaccttaaacgaaaaaatcaccgagtttttcctcggtgattttttcgtttccgcaagctttgccgtaaacgcaggctccctctgactaagggaaagggagagagacagcgatctaccaaccccacagtatttctctttccaccaaaatctttgtatataaaaagggcggcatttagccgcccttcgggagaccccttaatagggtctcccacggacggaacgtccactggaagttccgtcctcccgtcctgatttttcgttaggcaaaaaggttccgccatttgcgaatggcggctcagggctttgccccgagacctcacgacctttttgaaaaaaggtcgatcaaaaacttttacgtcgctacgctatgattgccgtttgctcggctatcgttcacttacagtgtaaacgtatacgtgcccgcggtgagcgtcatttcttccgtggtactgtcttttttcggcagatagacttccgcttcggcgtcaaacgggatgacaacggtgtacgtcacttcgccgttatcctcgtactgccagccggtttcatagtagcctgcggcggtattgaccttggcttttgccgcgccgagtcttacatcgggctgcgggcggatgacggcctttttataaccgggcacgtccggcacggggttcaggccgcagacgttcttatacacccactcgaacaccgcgccgtaagcgtagtggttcatggagttcatgccgatgccgctgatcttgccgtccggattgacggagttccagcgctcccagatcgttgtggcacccatgttgacctcatacagccagccgggattttcctcgttcaaaagcagcgtgtaggcttcttcattcgcgccgttatcggagagcgcgcggcacagcacaggcgtgccgaggaagccggtcttcagcttgcctttattcattgcgagcaagccgcgcagggtttcggtgatcttctcgcgcgcgaactccggcgcaagcccaaacgaaagcgaaatggcgttgccggtctgcgttgcggccgcgcatctgccgcccgccgtgtagaactcgcggcggatggcgtcgagaatttcgtctgcacgctttttgtagacgtcgtactcggtcgttttgccgagcgcgcgtgcggcatttgcaacgcacatggtgctcttatagtagtaggcggagcacaggaacgtgatgtccgtgccgccgagaacagactcgggattgaagccggattccgggccgtccagtgcgagccaatcggcaaagtggaactcaatgcccggccacagacgcgttgcgccgtgcgcttcgtcgtagcggtagatccaatctgcccacagcttcatgctctcgaagccgtttttgagcacgctgatgtcgcccgttgcaatgtaggtttcccaagggacgatggctgcggcgtctgcccagccgcagtgaccgccgccgtttgcgagcattgggtttgcttcgcccggcttgcggctgatgagcagcggggcgacatccggcaccttgccgtcgaggcgcttctgttcctccaaaaggtctcggatatacttcgtatagaacgcgccgcaatccatgttgtagttcgccgtggggcagaacgcctgcgcgtcgcccgtccagcccatgcgctcgtcgcgctgcgggcagtcggtcggcacgtcgaggaagttatcgcgctggctccagacggagttcaggtacaggcggttgaccttctcgtttgcggtcgtgatctcgccggtctgctcgaggtcggaataaagcgcccacgcctgaatatccgtgatgccggtgaggtctgccacgccggagaatttgatgtagcggaagccgtagaaggtcgcgatcggtcgaataaaggcttttttgcctgtcgaaatatagcggtattcggaaagcgcagtgcgcaggttatcgcgatagaagcagtcatcctgcaacaactcgccggtctgcacgcgcagctcaacacctgcgggcaggtcggccatgaacgtgaaccaacccgtaatgttctggccgaggtcgaacacaagctcgtttttcggcgtggtgatctgcttcggggtgatgatatgctttgcttttacgggcagcgagaggcgcgcggaaattgcgccgaggttcgtcgtggtgttgcgcttcaccggctgccaatttgcataggtgcaggacggcgcgcaccagttttcgatttcaaggttcgcatcgtagcgctcgccgtcgtagatgttgccgaacgtcagcgggttcggcgcgcactgccagctttcgtccgtgacgatgacggtctcgccctgcgtggtggtgacgtgcagttcaccgaagagcaggtattcctctgtgtacatgttgcaaggttttcccgggaaattcgtttcgtaatcaccaacgacgccgtcaaaaccaaagcggcctttcgcccagccgttgcccaaaatggcgccgatgacgttttcgccggtgtgaatgaggtcggtcacgtcgtaggtctggtactgaatccagctgtcgtaggcggtgcaaccgggggcaaggtactcatcgttcgccttttcgccgttcaaatagagctcgtagatgccgaggcccgtgaagtacgcgcgggcagagagaacttcgccggtgatctcaaaagcacggcgcatgtacggggcggtgtccggcgcaaggcacggagaaatacgctgtgccgtgaacggctcgtcgagctttgcggtctcgaaccacgcagtgtcgcttgtgaccaattcaccgttatcgcccataacggtaacgcgccagaaatagcgcgtgcggggctcgagggcgatttccaccggtacaccgagggacgacgcggttttgcacgcgccggtatcaaagataacgtcggcaaaatcctccgttttggaaacctccacgcgcgcccaaagctgctttttcgcttcggtatccgtgactgtccacgagacgtgcggcgttttcagatcaaaaccgagcgggttgacgatacggtttgttttcattctctgaattttcatgttccgttcctttctgtgcgtttgcacgtgcggctttttcctttgccgcttcgtattccggccgcgtaaagctgcggcattttgttctatttcacagaatatcagatatgaagatgaaaaacaaggactcaatttccgcaaaaatacgtctttatttttagtaattgcatgcgaagatattgaactaagccgttttcaaaagttcttataggttagccgcgactttagcttgacacaagtccatatttgtggtttaataagcaaacaagtttatcggtgccgcaaagcgacactgcgataagggagtagtcggcgcgaagcgctgtatggtcgacacacttgaggaaactcacggctatgcatgaaatgacgagacttatccgaaaggcatctccggcttttcgggtgagtcttttttattgcccgcgcacgtatattataagaaaacaacggaaaacggtgatcaaaatgagcttatgggaactcttcattctggcagttggcctttcaatggacgcatttgcggtttcggtatgtaaggggctttcggtgaaacagctgaaagcgaagcacatgctgattgtgggtgcctatttcggcggatttcaggcactgatgcctcttttagggtacattttgggtatacagttccagtcaatgattcagcagttcgaccactggatcgcgtttgtgctgctggtgctgatcggcctgagcatgataaaggaatcgcgcgaggaagcggagaacctcaacgattcgttcagctttaagacgatgctgccgctcgcggtggcgacgagcatcgacgcgctggcggtgggcgtaacgtttgcgtttttgcaggtcaacatcgtaccggccatcagctttatcggcgcaacgacgttcattctttcggcgatcggtattcgcatcggcaacattttcggcgcgaagtataaatcgaaagcagaacttgtcggcggcatcgtgctgattttgatgggtgtgaaaattttgttagagcacctcggcgtactggatatgattttcggttaagaaccggaaacaagaaagcgccccgcttccttttattgaaagcggggcgctgttttgttttaatttacgaactaaagtaacccgttaaattacttctgtgcgtcgtagtaatcctgatatgcggtgtagccctggagctcgatgttcgatgcacgcttatcggtgtagatcttctcaatgtcatgaacctgattggactcagcaaagtctttcagatcctgaacgagcttatcgaacgttgcgtcgtcggaagccatgatgatctgcgggatacgcatcttgcactcatcggtgatagcctgtctggacataccgaggtcctcggtcggatcgatctcaagagagaggccggtgttttcgtcggtcaggaacttctggccggggattgccggatggatggaatcttccggagtgaagacgtgatcctgaatggagataacccagcttctggattcttccggctgctgctcgttaactgcatacttcgtcaagtcaacgttatcggagtgagccggctgagaccagaaccagcaacctgctgcgttcttttcgtcagaggtaagctcttcttccggcttcttgaggatcgggttgccctcgtcgtccttgccttcccagaggccgccctcaggaccgtacatcatgttgatggagccgtccttcgtgagcatccaagaatagaggtcgaagatacgctgcgggttttcagcctttgtggtgatgcagttgacgttccaaccaactgtgccgccttcttcgccatatacccaatctacgccttcagccggcgggtagatcggaaaatccttaagctcccaaccgaggagatcgtaggtgttgccgtctttctcctgaaggagggtacggaagtgtgtggtatcgtcctgagagaagtcatagtacagaaccgctgcacggccgttggagagcttctctgtgtactgatcggtgctgtcggtataagtggtttccgggaagaggccttctttataccactggttagcaagcttcaaagctgcaacatagttgtcgtcatagacagcgagcttaatgtcgttatccgcctgagaccagtatgtatcaacgaggttcgggttgccgtaggaacgatagatagcggaaacggtgtagaagccgttatcgtcgtttctcgggagccacgggaagatgctctgatcgtcggaagtcttaacgcccttttccttagcatccagcatgaactgatgcaggtcttcaagggtcttgagttccggggaaccgagctgctcataaacgtcgtggttgaccatccagctcatgttaccgccggtagcgcccttacgagcccagttcgggataccatagagaccgccgttaacggacagcagcttctgggtggattcgaggatgtcctcatcaaaggagcagccttcatacttcaaggtgttgacatcgacgagcttaccgaggttgatgagcttcagccagttcgcgttacggtcgaggatgacaacatccggcaggtcgtcggaggagatcatcaggttcagtttggaatccgcatcagcttccgggcaggaatagttgaccgtgatgttgaacttttcgttcatgtacttcgatgcagcgtcttcgccccagggcttaacggaaccctgatagctgtaatatgcatcaaattcgtagtgctcggtggtgtcgtccgggccggaggaaccggttacctcggagcttgcgtcaccgccgtctgtggattccgctgcggaagattccgttttggaagatgtgctgctttcagccgtggaagagtttccgccgccgccgcagccggctactgtcagaatcatggatgctgccatgactgctgccagagccttcaagagagagtttctggacttcatactttgcctccttaaagaatgcttcgtcaatacacaatacactttgcattgacaatttattttatgattagcccttaacggaaccgatcataatgccttttacgaagtagcgctgcaggaacgggtaaacgatgatgatcggaatgatcgtaacaaacatcgtagccattgtgatggagcgcacgttggtctgcttgcccttcaaagcgttgccgtcgatggtgacgcccatgcccgcagaggccatctgttctgcgaacttcgcttcgttgacgattgcgagaaggacattctgcatcggcttcaggaaatcctgcgtaatgtacaggtttgcctggaaccagtcgttccagtgctgcacaccgaagtacagggcgatcgtcgcgatgatcggtgtggagagcgggaagtaaattttaaagaagatggttatgtagtttgcgccgtcgatgagggcggattcttcaagcgcttccggcagagactggaagtagctgcgcatgaggatcatgttccacaggttgacgagtgccgggatgatgtacacaaggaagttgttcttgagaccgagactgaggatcaagaagtaggtcggcatgaggccgccgccgaagtacatcgggataagacacagcattgcgtaaacttttttgcctacgaggttcgttctggaaatcgcgaacgccagcataccggtaatgagcacgccgccgaccgtaccgatgacggtacgtgcgatggtgatgaagtacgccatccagatcttctggtttgtgaaaaccagctcgtagtttctccacgtaaacttacgcggatagatggtcaaaccaccaagggtggtatcgttggaatcgttcaaggaaatcgcaagagaattcaggaacgggtacagcgtaaggacaagaaccagaacgatggtgacgatcatgatgatatcgatcacgtagtcgctggccacgcgcttggcgcggattttgtttggattttttgccatctctctgttccccccttagaaaagctgtgcttcgccgaatttacctgctacgtagttggaaccaaggagcagtgcgaagttgacgatggacttaaagagaccggccgctgctgcgaaggagaaacgaccctggctgacacccaaacgataaatgaaggtatcgagcacgtctgcgtattctttcaacatagagttgcccatctgcttggtgagcatcatgatctggtcgaagtttgcattcaggatgccgccgacctggaagataaacatcaggatgatggtcggtttgatggacttaatggtgatatgccacatcttctgtgcgcgcgttgcgccgtcgatatcagccgcttcatacatatcctggctgatgctcgtgatagcggagatgaagataatcgcgttccagccaagctccttccagatatccgtgcacaatgtaatgccccagaagtacttgccttcggtgaagaagccgatcggttccttcgtgaagccgatccgcatgaggaactcattgatggcgccgccgtcggtggacataaggtcaaacatcaacgttgcacatacaacccaagagatgaagtgcggcaggtagctgacggtctgaaccgtttttttcagcggctggaagttcatttcgttcagcagcactgcgaagagaatcggcagcgggaagccaatgaacatcttaagggcgctgatgaccagcgtgttgcgcatggccagtccgaagtacttatcggcgaacatggtctggaagtgtttgaagcctacccactggctgaagcccgggaaatcaccgagctggaaatcctggaagcccataaccacgccgtacatcggtacgtagctgaacaggaggactaagaggatgccgggaactaacaatatctgcagatcccactgggcaagcattctggaaaagacgttctttttgcgtaagaccgtatttccactcgcttgtgcttgtttcaatctcatcacgctccatttccacaaaagatggaaaattttttacaaaaagcagaactcaaagcctgcttaaagccaaaatttttttgaaacccgactgccttttgcagttttacggttttctcgtcgaaagccctgaacgatgttcggatggtttccaaatttgtctaaatctccgcaacaatttcttgaggaattgttcatattatacacacgcattcgtaacaattcaaggacaaattatgcaaagcatattgacaaattatgcaaaccgtgtacaatataggtacaaaaggtaaattttgtggtgaagttggtgggcatatgttacaaagtactatcttagacacacaaaaatgcgagcatgaaaccgcatccattttgaacaattttactattgccttcggaaaggtgcattggggcttcccggatttcgaaaacttggatgaattgttcgaaaatcagcagtttgttttgatgctctgcgtcaaagcttcgtctgaaagaagcgatttatatttgaataacgacatttttaatgtagttaccggaggggtgatttgtgtgcgccgcagcgataaaatcctttggaatcactgctgctgcgacaacatgcagattctctggcttccctttacaatgaaatgcgtttccgactgttcctgcgaaggcgccgatgttttaaatgactttttgtgcggaaagctgagctctgtcggttataatacacagctgattgattacagcgacttcctcagaaagcgcgtttgcagctataccaagtgctgcctgaaccaagttctttccggatttatactggactgcatttttacccttaagcaaaattacgacggcctctccaacaaggacaaaatcacccaatacctgctcgaccacgcaacagagaagatcagcgtgccggaacttgcgaaaaagctttcgatttccgaacgcgcactgttctattattttcaagataacttcgattccaccccgagcaattacattaaccgtatacgcatgaacgccgccgcagagcacatccaccgcgggttatccgtgaaagaagtgaccgaaatgtaccacttttcggaatcttctgcgttctgccggttatttaagaagtacttcggcatcacgccgacggaataccggcagctggcagagaaatcgcagctgaaaatcgtctcgcgggacaagctgaaggattaaccgtatatctttcacgcgatccatagataacaaaacaccgttcgttcggaaaagctccgagcggacggtgttctttatcttatattatattgtattcgatcagtcaatgaccttgttgtcgcgatccggaacaattttttcaagaaactgctctacggtcatggcgccgaggtcgccctctttgcgcttacggatagagatggtgttgttttcgatgtccttatcgccgacaacgaccatgtacggcaccttttcgagctgtgcttcgcgaatcttgtagccaatcttctcgctgcggtcgtcgacctcacagcggaagcccttgtcttccaactgcttcttgacttcatagagatagtcgaggtggcggtctgcgatgggcaacagcttcacctgtaccggggcgagccacagcgggaacgcgcctgcgtacttttcgatgagcaacgcgagggtacgctcgtagcagccgatggaggtacggtgaatgatgcacggggtcttctgcttgccgtccttatcggtgtagaccatgccgaactgctcggcaagcatctggtcaatctgaatggtgataagcgtatcttccttgccgtacacgttcttaatctggatatcgagcttcgggccgtagaacgcagcttcgccgatgccgatctcgtacggaatctcgaggtggttgaggatgcgctccatgaggccctgtgcctcgttccactgctcttccgtaccgatatactttgcacggtcattcgggtcccattgcgagaagcggtaggaaacatcctcatacagaccgagtgtcttcagcatgaagattgcaagctccaggcactttctgaactcgtcttccagctgctccggtgtgcacatgaggtggccttcggaaatggtgaactggcgcacacggatcaggccgtgcatctcgccgcttgcttcattacggaacagtgtggaggtctcgttgtagcgcagcggcaggtcgcggtaggaacgcttgcggtttaaataagcctgatactggaacgggcaggtcatcgggcgcagggcgaagacttccttgtccttctcctcgtcgccgagcacgaacatgccatccttataatgatcccagtgaccggaaatcttgtacaggtcgctctttgccatgaacggggtctttgtcagcagccagccgcggcgctgctcctcgtcctcgacgaagcgctgcagaagctgaacgatgcgtgcgcccttcggcagcaggatcggcaagccctgaccgataacgtcgcttgtggtgaaaagctccagctcacggccgagcttgttgtggtcgcgcttcttggcttcctccatcatggtaaggtgctcttccagcaagctctgcttcgggaacgcgatgccgtagagacgctgcagcatcttgttgcttgcatcgccgcgccagtatgcacctgtgatggaggtgagctttacagccttgacattgccggtgcgcatgaggtgcgggcctgcgcagaggtccgtgaaatcgccctgcttatagaaggagatgtgctcgccctcggcagcgtgctcacggatgagctcctctttatagtcctgacccttcatgagctccagtgcttccgctaccggcagctcgaagcgctcaatctcgatgtcttccttgatgatcttcttcatctcggcttcgatctttgcgaggtcgtcgttggtgatggcctgcggcagctccatatcataatagaagccgttatccacagccgggccgatggcgaactttgtgcccgggtacaggcggtttaccgcctgcgccatgatgtgggacgcggtgtgccaatatgcctttttgccctctttatcgtcaaacgtcaaaatctctaccttgcaatcttcgttgagcacggtgcgcaggtcgcacacctcgccgttcacttttgcggcacatgcggacttataaagacccatgccgatgctttttgcgacttccgctacggaaacgccgctttcaaattccttttcgctgcccttcaggtcaaccttgatcatgattctcaatcctttcctaattctatgacaaaataaaaagccccgggatccctcaccgggatctcggggcgacactgcgcggttccacccgagttcctgcgtgttaaaacacacttgtgttaacacacagctcgttttctgccttaacgcggcggcaacgtccgccttttcggtaaaccgttcggcggcggctcaaaggtggtatttcggtttcgctttccgcggtgctttcagccggtggcaaccgctctcttttgaaaagacctgaacccgaacttccttatcaaagcccttttcttgtccccatactatcaccgtttttctgaaatgtcaacacccaagaaaagagtttttcacataaattcttcattgtctattatcgtagacagtaaaatgtctatttacgcatacaatttgcgtagaggtgatatgcttgctttgggaaaataatattgtggggcaaacaatacggtctgtgcgcaaagcaaaaggcatgtcgcaagaggttttaagcggctttgcgggcatcgcgcgcacgcatctgacgatgatcgagtgcgggacaaagcaggcgaatttctcgacgatatgcaagattgcggaagcgtttgatatgcgccccagcgagcttgtccgcaaaatggaagaagcggaagaaaagcgggataaatagacccgcagaaaaaatttttcttctaaaaagcaaaaaaatcggcttatatactgggctcttgtataaaacagaaagaaaccgtaactatttcttaaattctttggttgacatatgcaaggaaaagagataaaattgtacatggagtgttttacactttttaagtcagccgtgttccgagcagtttatgcggctgctttttgtgtggagccttcacagggaataacgcaccctgcataacctaatttagtaattgaatatcgaaaaccttagcgaaggaggtgcccaatgccacaagtaccaatttgggtttgtgttctgatcgcagtgttggcagccgccgtgtgcggtgctgtcgctttctttgcgggtgtgaatcatcgaaaaagagaagcggaagctgccatcggttcggcagaagacgaagctaagcggatcatcagcaacgcgattaaaacggctgccgcaaagaaaaaggaagccgtgctcgagggcaaggacgaaattcaccgtctgcgcaacgagtccgaacgcgagatgaatgaccgcagaaaagaaattcagcgtcaggagcgccgcgtttcccagaaggaagaatctttggataaaaagatggaaaatctggaatccaaagaaaacgcggtcgaaaataagatgcgcaaggcggaggaacgcctgaaagaggcagaatccgttaagaaaagtcagatcgacatgttggagaggatctcttcctttaccgtggaccaggcaaaagagtatttgctcaagttacttgaggatgatcttgtgcatgaaaaggccattaaagtaatggagtacgaacagcagacgaaggaagaatgcgacaagctggcaagagagatcatttcggtcgccattcagcgctgcgcggcggatcacgtatccgaagccgccatcagcgtcgttccgctgcccaacgatgaaatgaagggcagaatcatcggccgcgaaggccgtaacatccgcgccattgaacagcttaccggcgtggatctcatcatcgatgacacacctgaagccattacgctttcgagctttgagcccgtaagacgtgaagtggcaagaatcgcccttgaaaagctgatctcggatggcagaatccacccgaccagaattgaggagacgattgagaaagcccgccgcgaagtggatgcgaccattaaagccgagggcgaacgcgccgtgcttgctgccggcgtaaacggcattcaccatgagcttgttaagctgcttggtcggctgcgttaccgcaccagctatggacagaatgtcctcaaccactctctggaagtttcttaccttgccggtatgatggcttccgaactgggccttgaccccaccattgcaagaagagcaggtttgctgcatgatatcggcaaagcgctcgaccacgagattgaaggctcccatgtggagatcggcgtggatgttgcaagaaagtacaaggaaagcgaagccgttatccacgcgattgccgcacaccacggcgacattgaagcgaaaacggtcattgcctgcctggtgcaggcagccgatgccatctcggcagcacgccccggcgcgcgccgcgagaacatcgaaaactatatcaaacgtctcgaaaagctcgaggccgtggctgcatcgtttgacggtgtggatcgctgctacgccattcaagccggccgcgagatccgcgtcatggtaaagcccgaagtgatcaacgatgagaaaatgacgctgctcgcccgcgacatctgcaagaagattgaggaagacctcgaatatccgggtcagattaaggtcaacatgatccgtgaaagcagagcggtcgatttcgcgaaataacatagttcgtcacaacgctcaaccgaatcacaagcaaagccctccgggaggaatctcggagggcttttgttatgtaaagccgcacgtcggtgggttctcccccgccttggcacgcgattttgctgtaaaaaaagcaacacctcttaccctgccgacaagatcaagcataaatgctcggattttcggtgctacggtcaaaaggtgttgctttgcaaaatacaattttaattatgtactgaaattcgtgttagctttgataaacggagtgcgcaaaatatgtgtaaaaaattcacattttgtcgattaagacgcattgtccatctgcaaacacagtttatcggaaatcatggcgatgaactcgctgttcgtgggcttgccccgcgtattgtgaatggtataaccgaaatacgaattcaacacatccacatcaccgcgatcccaagcgacttcgatcgcatggcgaatggcacgttccacacgggagctcgtggtctcgtactgctttgccacactcggatatagctgttttgtcaccgcattgataatctccggatcttcgatggccatgatgatggaatcccgaagatagtggtatcccttaatgtgggccggcacgccgatctgatgcagaatctccgtaacctgaatgcgcaggtcgctgcggctggtgccgtttgacggatgttgtgccgcaccggccaacgtaaagatacggtcgatgatctcggttttgctgaacggctggatggcgtaataatctgcgccggcctccatgatctgccgctccaaagtgtttgaggaatacgctgccgtgatgatgaacaccggctttggcagtccctcggctttcacagcgtgcataacgcccagcgcatccacgcccgccataaagagatccattacaaccacatccggtttttcatcccgtattttggtcagtagcgctgttccgttcctgtttacggtcacaacctgtgcaccccgcgaagccaatgcgtcggtgctttcacggctccattcgccgtcatccgcacaaatgatgacctttatttgcttttccatggcttacctcctgcgtgatttaaattgtgaacaaattttaccatattatacacgctatttcaagagggtaaatgaaatttctttaattaatttgtttcctaacaaaaatatgcatcttgattttgttagctttcatcacgctttcggttgatacacttcttatttcgacaaaaatcagcagataatcaaacatttttattacagccaatatcccggcgagtttcttaccaaaaagatgtatgaaacagaacggaaaccgattctgtaagattgtgtcataccttctgtgagaaacatggcaatacggcgcgaaaaagggacgcgtgcgccgcagcccaccgtccccctcgtcttaattttcgttcaggttttcgagcatcgtttcggcaaaaatgccatagccgcgtgtagcatcatctacgaaaacgtgcgtcaccgcaccgaccagcttaccgtcctgcaaaatggggcaaccgctcatgccctgcacaatgccgccggtacgtgcaagcagctccgggtcggtcacgtgcagcacaagggtacgtgtttcctgcttgccgtctgtgctgacgcgctcaagctccgcatcaaacagccgcataccctcatcgtcgatcgtggcggcgatctgtacggcacctgtatgcacatttccgcgcggcagcacctctacggtctcgccctcgtgcggtgcggagagtttgccgtaaagcccaagctccgtattctgcgtcagcgtgccaaggctcttgccgcccgtaaaatacccgcgcaggcggcccggccgaccgctgctgccgcgctcgatgccgcagacggaaacggcagccggctcgccgctgcggatctccaaaacattgcgcgtgtcggcatcgcaaatgccgtggccgagcgcgccgaacgctttgccgtcttcggtgtaaaacgtcacggtgccgatgcccgcagcgctgtcccgcacccacatgcccgctttgtacgagccctcgcacaaaacggaagtaacctgcgccgtgaacgtttccgtgccgcgccgcagcgtgagcgtgttcgtttcgttttcggaaagcacagcggaaagcgccgcgttcgtctctacgttattgccgtttacggaaaggatataatcgccgggctgaatgccggcttcgcttgcagggcattttaagccaccgtctgcataaatttccgaaagtgcggcaacaataacgccgtccgaaaaaagttttatgccgaaaacatcgccgccaagctgcacggtgcgcaccgtttctgtctttgccgtgatatgggaagcggaaacggcgtgcgccgctgcgttttccggcagcggcaggccgatgagcccgcacacggaaagcatcagtaaagccgctgtgcccacgcttgccgcaaatgtgcggatgccctcaaaaagcgagatgtcgcgtcgttttggggcgtgcggttgcggttcattttcaaaattcaagtcttctcatctccttgcagaaaaattcagaaagctcaaacgagccttctgcttttacttttccacgcggagagaaaagtatttgcggcaattaaaaacacctttgcacaacgaaggaaatcgttacgcaaaggcgatcgtttttggtctgccgcactgccgggctcgcagcacccggcagaggacagtggggtaaaaaataggggtaatatcggaagaaacgaactgtttccgattttcggctccgcgtaaacgctgtggggaagcagcgcccggctatcgacccggtgcggaacgtttaaagaaatgaaggaagtaaaaaatgaagaagtttgtaactcattcggctctctcttgttcctcctgagtacattacgtagtatagaggaagaatatgaaaacgaaattgatatttcgtgaaaaaaggaggaagtttttttgaaaaacatgtgaacaaaaaaggccgcatactccacaaattttgattgactttcggcggaaaagctgttatactttggatagtgtaataaacaatgtcaatgtctcacaggttttctttgtaagtcattctttgggtggtttacagaacctgtgtttttttgtatggcgtttacgaacacaatctttatttttatatggaggtaccacaatgaacaacggtacagtcaaatggtttaacgcagaaaagggctacggcttcatttccaacgatgagggcggcgaggacgtattcgtacatttctccgcaattcagggcgacggcttcaagacgctgaacgaaggccagaaggtcacctttgagaccgagaccgacccgaagaacggcaagctccgcgcagcaaatgtcgtaaagctctaattgtaaattagaacagcgagataaaaggcacctgtgattgatttcaccggtgcttttttcttttgcataagcttcgcttttcggcgcacaatactgtgggaaggaagggatgccaaatgcaaaagaaaaacgaaaagaagttcacccacggcgagcatgtgacgatttaccctgatgcgccggagagcgtcgcaagcgccacggagtgcaccggcctcatgcccacgccgccgcaaaacgacgcggagtttacgtcgtaccaagacctgcacagcatggagatccccaaaaagctccccggcaagcggaacttcgagcttggcgtgtacgacgataagccggaagatattcagttataaaaagtcagcctcatcggtcggattcggcgcgatgaggctggttactttttagctttatattcgcttgttttactcttccagctgtgcggtataaagctggtagtagtggcccttctgttccatgagctcgtcgtggctgccgctttcggcaatgcccttattcgagatgtacaggatgcggtcacaatttttgatggtggacaggcggtgcgcgatgatgaagcttgttctgccctttaaaagcgcctgcaagccttcctgcaaaaggcgctcggtcttcgcatcaatggaggacgtggcttcgtccagcacgagaatcttcgggtcggaaagcagcgttcttgcaaacgcaataagctgcttttggccctgcgagaggcgcgagccgcgctcgtttacctgcgtatagtagccatccggcatttcgctgatgaactcatgcgcacgcacggtctttgcagcggcgatgatctcctcatccgtggcgtccaagcgaccgtagcggatgttatccatgatggtgccggagaaaatgaagctgtcctgcagcatgatgcccatttgcgcgcgcagcgagtgcagcgttaccttggagatatcgtgcccgtcgacgagcacccggccggaattgatgttgtagaaacgcgagatgaggttgacgaccgtcgttttgccggcacccgtgggaccgacaagcgcgatggactcgcccgctttcacatcgagattgaagtgctccagaacgttgatggagccgtcgtaggagaatgtcacgtcgtcgaacgtcacgtcgcccttaatcggcggcagctccgttgcgtccggcgcgtcatcgacaagcacgggctcatcgatcatctcaaagatacgctccagatacgccacggcgttgatgaatgtattgtagaggttggaaagctgcaaaatcggctgccagaaacgccacgcatacgcggaaatcgcgatgagcgtaccgatttgcacggcgggacccaaaagcgagaagcccacaaggtacatagcgccaacgacccatgtggagatgttgttaacagaaaaccacacgaggttcgaggtgtactgcgccttcatccagcttttgtacattttggtgttaagattgttgtagatcttcgcattttcctcttcacgcgtgaacgcctgcgtgatcttcataccgtcaaggctctcatgcaggtaggcgttgaggttggagctcttattggagacatcctgccaagcgcggcgctgtgcgggcttgatgacgagcacgatgatgaggaacagcgggatgcccgccatgacgacgagcgagagcctgacatcacacatgaacatgaacacggcgatgagaatgaggttgaaaatttcgagaatgaaattgatgatgccgttggagagcgcatcggaaacagagttcacatagttgatgacacgcgtcagaattttgccgtgtgggcggtcgtcgtagaactggaacgaaagccgctgcaaatgctcaaagagatccttgcggatgtcgtagataatggcctgccccaccaccgtcatgtagcgtgagcgcttgacggaaaagaaaatggaaagcagaatggataagagcatgatgcctgccagaatgaacagcattttataatcgcggttcggcacggcgacgttcagggcggtctcgatgagcttaggacctacaagcgcacacgcggcggaaatggcggagaaaacgagtgataagatcattttctgtttgtgccgcttgatatacacgcctgcacgcagcaagtgtttgatattaaatggggtttccagcgtttcgtcaacgtcaaaacggtttcttgccattacgcagcaccccctttcttttcaccggcaatgccgttttgcagctcataaacctcgcggtaatagcccgggcgggaaatgagctcctcgtgcgtgccgacatccacaacgcggcccttatcaaggatcacgatgcggtctgcgcgcttcgtggtggaaatacgctgcgcgacaatgatcttcgtacagtcgaaatcaaggtgcgcaagctggtcttgaatatatttttcggtctccatatccacggcggaggtggtgtcgtccagaatgagaatagacggcttgatggcaagggcacgcgccagtgcgatacgctgcttctgaccgccggaaaggccggtgccgcgctcgccgatgaccgtgtcaaagccttcgggcagcttatcgacgaaatcgacgcaggcgatctttgcgaagcgcttcacatcgtcctcggacatttcgggggcgccgtaggcaatgttgccgtctacggtatcggagaacaggaacacatcctgcgtggcgatgccgacagagccgcgcagctttttgagatcatacataccgacaggcgtgccgtccacggagacggtaccgccggatacatccgaaaagcgcgggataaggctgataagcgacgttttgccgcagccggttggtcccatgatggcgatggtctcgccgggtttgatgtcaagattgatgtcgtgcagaacctctgtgccgttgcgctttaaggttacgtggtcaaacttcacggcgccctgcacgcggccttccttcttcacggcatcctggcgcgtgacgatggtggagcgcgcgtagtagagctcgacaatcttcgatgcagaggcaaagaaacgctgcaggtcgttgatgagcatgccgagcgtgctcatcgggttcgtcagcgtccagcacagcgagttaaagagtgcaaacgtgccgattgaaatgcggcccatgatgaggaacgagccgccgacgagcagaacggcgatggaaagcgactgcgaaaaaccatcgatatacggcgagaatttgaaccacagcagcgacgctttgaggttcgctttgcggtaatcctcgtttttcttatcaaactgctcgatctcgtagtcttcgcgagcaaaggctttaacgacacggttgccggcgatgttctcctgcgcggcggtgttcatgcgcgaaaggcgctcgcgcaggtcgacatacagcggatgcacctgctttgcgaagaccttcgtcaggatgaaaataatcggcgttacggccagcatggcaagcgcgaacagccagtccacacaaaggaatgtgatggatgtggtgagaaacagcaccacgcagtcgatgatcatgcggatgacatagcacgtagtgtggcgcaccatgtcaaggtcgccggtcaggcgggtcatcagatcgccggtgcggttctttgagaagaatgagctatcctgcgcctgcatgtttgcgtacagatcgcggcgcagcttaaagagcagcttctgcgagcacgtctcgtacgtcatgaccgaaagatagttaaagcacattctgaacatcgtgaaaccgatcagaatggagacgagcacaacgagccgatgccaaagctccggcgtagtgccctgcccctcttttaccggcgtaaatacggtgtccatgatctgcgcggtcaaaaccgagttgaccagcgccatcatagaaagaaccgcagtagagcacagcgcaaaaacatatcgctttcggcagccttccaggtttttccaaacccacttcagctgaaacatagcgttccctttcctttcaatgcatatcctgctttctctgtacccttggtacagttgtacctttggtacagtccgcaccgtacgtgcggtttcctcctcaggcgcatggaatatttacgcagaaacacttcatacgcttgtttaaactattataactgtattctgttaaaatggaaccctttttcgcgattttctctccgtgagaacaaacaaactttggttgagatttttaggcaataaaacaaccccgcaaatcggacttttcatccgtttgcggggcatgctctatatgcttttattatatatagtatacgtacttttgtaatttagatttcaaagaccgtgtaggcgtactcggcttcttcgccgggctgcaaagtgcgcatgccgtgcttcttttcaaacacgtcgtcctcctgtacggcggtggcgcagccggtccacggctccagcgcaacatacgggccgtcgtttgcggcagaccagataccgagcatcgggaagccggaaaactccatcatcacaccgcggccggactggcggcttttgagcgaaacgcaggtggagttgaggttctcgaacacgagcgcgtccttatagaacaggctgtgctgcagcgggatggtatccgtatcgtcaagctcgaagttcgtcttctcaaaatcgatcaggcagctttccatatcgagcgtcggacatttctggtcttccttttcctcgaacacgatgtcgtaatcttcaaaaacttcatcggactgaatcgggatattaaagcccgggtgaccgccgatgcagaacggcatgggcttcgtatcggcatttttaacggtaaatttcgtcgtgatgctgctgccggtgaggtaataggagaccgtcagcacaaaatcgaacgggtactgctttttcgtctcctcgttcgccgtaagctgcagggtgacgtagtcctctccctgctctgtgacggtgaattcctcgtggcgcgcgacgccgtggcgcttcatctcgtaccactcgccgttgatgcatgtgcggttatcgcgcagcgcgccgacgataggaaacaaaaccggcgcgtggccgccccaatatgttttatcaccctgccaaatgtgctcaaagccgtcatcgcccataaaggagacgagctcggcgccgagcgtatcaatggcagcagtttcgttttcgttttttatgtggatcagcataattcgtcctttcaaatcgcggcgcttttgcgccctgtctttttgcatgcacataacctgattttcaatcaacagtattataacaaacaaaaccgcttgaagcaagagcgaaagcctgctataattgagaaaacaccgaagaaatctcccgttttatcggtcaaaatccaccaaccggaaaggaatttacaatatgagagcagttattcagcgtataaacggtgcagagatcaccataaacggcggcgagacccgcaaagtcggcgagggccttgttgtcttcgtctgcgccatggagggtgacacggacgcgcaggcggattttctcgtgcagaaggtgtgcggcctgcgcgtatttaaggacgaaaacgacaagatgaaccgctcactcgaagacatcaagggcgatatgctcattgtctcgaacatcacgctgagcgccgatatgaagcacggccgccgcccggatttcagccgttccgcttccccgagtgaagctttgagattatataactactttgtggaacaggtgaaaaaccagcctatcggcaaagtatgcacgggtgaattcggcgcgcacatgcacgtaagtgtggaaaacgacggacccgtgaacatcatcatcgacacggaacgcatcggaaagtgacggtgtgcctatgacgcgatttttaacgctgtttgacacggttgtcaccgacccgcttgaggacattcccaccgtgaacgagcttgaaaaatggctgaaaaacgtcggcgaacaggcgttttacttcctcattcgcttagccgccgcagggctgcttttgtttatcggcagcaagctcatcaaatttttgatgaaccgcttcaagcgctcgaaactatatcaaaagatggacccggggctcgcttcgttcatggcgagcggcagccgcatcgtgctgtatatcatcctcattttgatgtgcttcggcgttcttggcatcgagaccgcctcgttcctcgcactgttcacctcgggcggcgttgccatcggccttgcgtttcagggcgctgtgacgaaccttgcgggcggcgtgatgattttgctttttcacccgttccgcgtgggcgattacattgaaacgacggaaattgccggcacggtgaacgccatcagcgttttatacaccgtggtgctgacgccggacaacaagcgcgtgaccgtgccgaacggctcgctgacgaacgccgccatcacgaattacagcgcggtgggacagcgccgtgtggagctgacattctccgtctcctacgattgtgacattgacaaggtgaagcaaattttgctttccgttgccgaaagcgacccgaaatcgctgaaagaccccgccccgctggcgcgcatgaaaacgcagagcgcgagctcgctcgatttcgtcctgcgcgtttggtgcgccccggaaaattactgggacctctattttgacctcaacgaaaacgtgaaaaaggcgctggatgaagccggcatggaaattccgttcccgcagatggatgtgcacatgcggtaaagcacgcacgaaaatacgaatattcccgcagcagcgccgtgaaacttccgttttcggcgctgaaattttcgtggacttttagcagaacccccaaaggaagatttatccggtcttccttcgggggttctgtattattcaatctctatattcttgatgccgtattcaagtatcacgttgataagctcattgcgcgaatagttgctttcgctcgcgattttatcaagactttgcaaaatatcttcccgaatacgcacggaaatgattctgttcccgtcctctccgcgctttttaatcttcaaaggttcatttttcacaaattccacctcacaatctatactaattatagattgacagccgaattatagtatgctacaattaggtttgtaatatgatatttatttgtattacaataaaatattttgagaggtaatatttatgagaaaaaccctatctgctattttagcagtgctgctcgcggcattgctgtgtgcgtgcggcaacactgctccagcttcaaaatctgaaagctctgtatcaaccataacaagttctgctgcaagcgaagaagtatctaacccgacagatgaagaggctcatgaaaacggttacccgaaaatcgaagaactcgtctggagtttcagaaacactgttgaatacgatgaacccgtagctgtatttgattatacaaataattcagattacaccattgttatgcttgagttatatttcaaaatgaaagaaggcgttacctccaaacaattgcaacttattgacccatttacggatgaacttattcctaatgacaaaattccagatatggagccttatgtatatgattggattgttagtgatcctggtgaaacagctgagggcgcagattgttacatggattataacacttatccgaccagcacagatcaatgtgatttgatggaattttcgtctgcaaatattcattttatcggagaagacggcaaaatacacacagtctcctattcagctgaaaattgtggatatgccctttcagaaaacacagaagaactctatgtttgggtcgataacgattatactaaaatgattccaaagccaaatacccgcattgcctctgctgatcagttcaaagaagattgcttgggtgtaaaagcatatgatatgtctcacgatgactttttagaatatattgactcctgcgaacaaatgggttttcaaaacaaatacccgaatgaagaccttgattattcttatacaggaacaaatgcaaatggttatgagattgatgtgcggtatatagacaatatgcactacattgagattaccctgcaaaaagaagaacaataaacactgaaaaagagggacagaacatgaaaagaacttttggtattgtaattatcctttctacgctgtttattacagcgctttccggatgcaacgaaatttccagcacaccgcagttggtatctaaagctgagggtgtattctccgaatccctcgcgcatgatgaatccagcgaagcgaaagaagcgaaaacagaattctacattggtgaaaccgccgaactggacaaagttcaaaccacgctcattgatgttacagaaagcactggctctgaatacaatcagccaaatgaaggaaatgtatttgttctttgtgaattcgaaatctgcaataattctgacacagaaatcgctgtatcttctatgctcagcttcgaagcctattgtgatgattatacttgctctggcagcttttctgcgctgctcgaaaaaggcgataaaaaccagttagatggaactgtcgcagctggcaaaaagttcaaaggtgtagttggatatgaagtacccgaagattggaaagaattagaaatccgatatactccggattattggaatgggaacgacattgtctttatagccaacaaataaaccaaatcgcatatcacatatacataagtaaaaagaggagaaggatcaaatccctctcctcttcttttttagttattcagcggggtaaaaagcatcttttccgagaccgcaggtggggcagacccaatcttcggggacatcttcccatgccgtgccgggtgcaacgccgttttccggatcgccgagtgcggggtcatagacataaccgcagggacactcatatttcataagatacactcctattacttgtcaccgaaatatctcttaaggagacctgcgaacgccttgccgtggcgggcttcgtcgcgggccatttcatggacggtgtcgtggatggcatcgagatttgcggcctttgcacgctttgcaaggtcgaacttaccggcggttgcaccgttctcggcttcaacgcgcatctcaaggttcttcttcgtgctgtccgttacaacttcgccgagcagctctgcgaactttgcagcgtgctctgcttcttcgtaagcagccttctcccagtaaaggccgatttccgggtagccctcgcgatgtgcaactcttgccattgcgaggtacatgccgacctcgctgcactcgccctggaagtttgcgcggagatcagcaaggatatcctcgctgacgccctgtgcgacgccgacaacgtgctcagccgcccaagtcatgttctcttcctgcttcgtgaacttggaagccggtgccttacatacggggcagaactccggagctgcttcgccttcaaaaacgtaaccacatacggtgcatacaaactttgccataataagatcctcctaaaaattgattttagtttgcggcttttaagccgttttatttttgcttttttctttgcattcggcgcacacaccgccgaacagcaggtcttcttttgtgattgtaaacccgtgttccgcttccatgcgctcgagtgtttctgtgtccacaagcggttcaaagatatcgagcacgcgcccgcagcagtcgcagacgaaatggctgtgtgccgaagtatcgccgtcgaaatgctcctgcccgttgatgacgccgacgcttctcgctttgccctctgcacagaatttttttagattgcggtaaactgtgccgagacttaaatcgggatattcgggtcgcagcgcagcgtagagccactccgcagttgggtgcaccgttgtggcacgcagtgcgttgtagagcgcctcacgctttcggctgaacttttccggcatcggcttcacctcctttaggtttgtgggatttctttctctctcacttgttggcactattatagcacgtctttttcgatttgtaaatagtaataattatcatttttattattattttgtaaacaaattgtgaacaagcctattgaaaagctttcaaaaccccgtttgcttgctttccgaaaacaagatgcaaaacggctctgcattttacccgcaaagccgttttcttagtttctatttattctcctttggtctcatcgttttccggtggaaacattttcatgaagttaagtgctgcgccgacgaggtcgtcgtttttcatcatttcgggaatatcctgcggccggaaccagatctgcgcaaacttctctatgacgggacgcaccatttccctttccgcatccgtatgcggtgtgccgatgccgcccgggttcatcatgtgtgcaatgaatgtcgcggcactctgcacgcgcgcttcaccctcggggttccacccgtcttttgtcatacagttcacgccttgctttgcggcaatttcaattttcttttccgcgcggtgttcaaaatctgcgtaatcccccgcttcgttccacgcgatttcggatacggcatacaggcgcgggaacagcaattcttcgaggtgttccggcgtttccacctgctccgaccacaatgccgcttcgtaaccgagcatattcggactgtctgcgtagctcttgcccatgacgaccggctgataatggtagaccttattcaatgaattgatgccatgcggataatcgaaatacaaagcggacatattggagaagatcaccttgccgccacgctcgataaatgccggcaccggcgcttcatgctgcgccgtccaatactgtatgatgttttcggtgccgacatctttggattccagaacatcgttccagcagacggcgcgcttgccgtgctttttgagaatagcgacgacacgctttgtgaagtagccctgcaaatcttcataatcggtaaggccaagcgcttccatgcgcgccttgcagtgcgggcattttttccattcggtcttcggcgcttcgtcaccgccgatgtggaagcggtcgtccgggaacagtgcgcagacttctgtcagaagcttttcgataaactcgaatgtttcgtccttaccggggcagagaattttctcaaaaatgccgccaaactggcacagctccgttttttcgccaaagcagctcaaatgcgggtatgccgcaatcatcgatctggtgtggcccggcatatcgatttccgggatgatctccatgccgcgcacgcgggcatattcgataacgctcctgatctcctcctgcgtgtaatacgtgccggtcgtttcgtgcagcagcggcagcgttttgcactcgatgcgccagccctggtcatctacaagatgccagtgcagaacattcagcttcacacgcgtcatctggtcgatgacctttttcacttcgtccgccgtaaagaaatgacgggagcagtcaagcgacaggccgcgatgaccgtagtgcggtgcgtcttcaatggtgacgattggcagcgcttcgccctctgctgtgagctccgtgacagtcgtcagtgcccacacagcgccgctttcgtccgccgcttccacggtgatgccgtcctttgtgacggtcagcttgtagccctcttttgcgatatcggcctttttcagcgtgataaacccgttttcggcggtctccacgtggccgtccagtcttgcagcaaatgcctcaaggcaccacggtgcaaaatcaccgagcgaaacggtgacggtctccggcagctttacactgccctcctgcatgtgcaccgatccgcgcggcgcgggaataagattcaacataagcaagattcctttcttcgggcaaacgaataacacgcttgtccttttacaacttctcctcggctgcaaccgaaccgcagcctttttgttctattaagaacattataccgcaatttgcttcttttgcaagacaatcgtgctatatttctatataattttcaaaattttaataattataagcagatatgacaaagcggaattttgaatctccgtctggacttgtcgaaatagatatggtatacttcaaacgaaaagtttttgcatgacggaggagcaaacatgggcaggttgatcttaattacgaatgacgatggcattgacgcaggcggcattcgccagctggcagagacagcaaaagcattcggcgaagtgtgggtcgtcgcgccggaaagccagcgcagcggcaaatcgcacagcgtaacgtatttagagccgctttacgtgcgcgagcgtccgggttatatggacggcgtaaaggcatacgaatgcagcggcgtgccggtggactgtgtgcgcgtgggcatccatctgctcggtcgcaagcctgacgttgtgctttccggcatcaatagcggctacaatatttccggcgatattcagtattccggcacggcgggcgccgcgttggaggccgctttctggggaatccacgccatcgcgctttcccaggccaacctcgattatcatcccgtaaccgaccgctacttgcgtgcgctcatcggtgaatatatggataaacctctgccgcaaaacacggtttggaacatcaactttcccggctgcgcaccggaagactgcaagggtgtaaagcacggctgcgccgtttcgcaggatgatttttacacggacagcttcacctgcaaaacactcggggacggcacggtggaatacacggtcgtgcccggcagaaactggcacggcagcgaaggcaccgaccttggcgcagtgtgcgacaactacgtcgccgtcggcaccgtgacgaatgtgcgataattaaatatacagattttgcacctgctctttgaaatcgcaaaagcaggtgcttttctatttttgaaaaccgtgttatactgaagaaaagcaaaacattgaaaggaaacagaacatggttatattaggtgtagacctcggcaaagcgcgtacgggcgttgccgtatgcgataaaagcgagctgctcgcaagtcccgtagaggtcgtgaacgagcacaaccgcgagcgccttttggagcgtgtagcgcagcttgccaaagcgcgccgcgccgagcagatcgttgtcggtctgccgcgcaacatggatggcagcgagggcgaaagcgcgcagaacgcgcgcgctttcggtgcggagcttgcggaaaagaccgggctgcccgttgatttctccgacgaacgcggcacgactatcacggcacacggctttttaaacgaaacaaatacgcgcggtaagcgccgcaaagcaaccgtggacgccgtggcagcgacgatcattttgcaggattatctcgattatcggcgaaaccgcaaagggtaatttacacaaaaaacgcatagacaaattcgcttcgcctgtgctataataacgatgtgctgcgcagaaatgcgtttttaaggcacggaaaggaaagataactatgggttacaaaatcatcaccgattccaccatcgatatggatcataaaatgatcgaagagttaggcctcacagtggtgccgctccgctttacaatcgacggtaaaacatataaagacaaggcagatctttcggatatgccgacggaaactttctacgcaaagctgcgcgagggcaaaatgtccaccacatcgcagatcaacgccgacgaattcacacgggtctttgagcctgttctgcaaggcggcgaagacgttctgtacattgcgttttccagcggtttatccggcacctgccaaagcgccttcatcgcgcgcgatgaattgaaagaaaaatatcccgagcgcaaaatttatgtgttcgattcgctctgcgcgtccctcggcgaaggtttgctcgtataccatgcagccatgctgaagcgcgccggcacggacattgattcgctgtataagtggctcggtgaaaacgttttgaagctctgccactggttcacggtggacgatctcaaccacttaaagcgcggcggccgcgtttccgccacagcagcgctcgtcggcactttactcggcgtaaaacccgttttgcatgtggatgacgagggccacctcatcccggtcagcaaggtgcgcggcagacggcagtcccttgatgcccttgtgcagaaaatggaagagaccgccattcagcccgcagaccagaccgtgttcatcagccacggcgattgcttggcagacgccgaatacgtcgcaaaccgcgtgcgcgaaaaattcggtgtgaagaacatttatatcaacttcatcggtcctgtcatcggcgcacactccggccccggcaccgtagcgctgttcttcatcggcgagcacagataaaggagtatatactatgttaaacggcaacacgatagagctcggcgtatgctactacccggagcactgggatacttcgttctggaaagaggatatgctgcgcatgaaatcctacggcatcggtgtcatccgcgtggcggaatttgcgtggaacctctttgagccggaggaagggcgctttgacgacagcttttgggaccgctttttaaatgtggcaaaggactgcgggatgcaggtcatcttctgcacgcccaccgcgaccccgcccgcctggctgacggaaaaatacccggaagtattaaactgtgatatttacggccacccggtctaccacggtatgcgcaagcaccacaacatgacatcccccgtgtacctcgattttgtaaagaagatcgttgagcacattgcggcgcattacagcgcacatcctgcgatcatcggctggcagatcgacaatgaagtcaactgcgaaacaaacaactaccacgcgccgagcgaccacgaggcgttcagaaagtaccttaaagagaaatacggcacgctcgaaaacctgaaccgcgccatgggcacgacattctggaaccagacctacacggactgggagcagattcacctttcgcgctacacgctcgcaaactccaacaatccgcacatgatgctggaggaaaagcgtttcatttccgaagcggccataaactacatcggtatacaggcggatattatccggaaatatcgccgtccggagcagttcatcacgacaaacggacttttcggcgtgctcgataaccacaagctcgtcaaggaaaagcttgacttcatgacgtatgacagctacccgaacttcgcgtttgcgatggagggcagcaagctctctccgcgctccctgcgcgaccgcgaaacatcctttaaccttgcaaaaacgcgaagcgtctcaaaccgcttcggcatcatggagcagcaatccggccccggcggttggaacacccgccttctgcagcccgcgccgaagccgggtcagttaagactgtggactttccagtccatcgcgcacggtgcagattttgtcagctacttccgctggcgtacctgcacattcggcacagaaatgtactggcacggattattgaactatgataatttcccgaaccgccgcacggaagagcttttgcgcgtaagcgaggatattcagaagattcagcgcatcgcgggcacgaagcatacggcaaagttcgcaatcctctgcgactacgacaatgagtgggacggcatggaggacaaatggcacggacccttgaaccgggagagcaccgacgggtggttcaaagccttgcagcgcgcgcacatcccgttcgagttcgtcaacatcaacgacgagggcacgtcccagccgctcgggaacttcacggctgctgtgtacccgcacccaaccatcatgacgcccgcccgcgcggaaatattgcgcgcttacgccgaaaacggcggcactcttttcttcggctgccgctccggctataaagatattgacgggcagtgccccatgatgccgatgccggggctcttagcgccgctgaccggctgcaccgtggaggatttcacgttcatcggcccggcggacgaaaaggaatacatgacgctcggcgaaaagaaaatccccgcgccgacgttcaacgatattctgcgcccggatttcgaaagctgcgaggtgctggcaacgtatgacggtaactattacaacggcaaacccgcgctgaccaaaaacaccgtcggcaaaggcacggtctacgcctgcggctccgtttttgcagaggagaccgctgcggcactcttggagctgctgccgaaagcagagctttgccctgtgacgggctggctggagctgcccgaggagatcgagctcacggtgcgtacaaacgagaaaaacggccgcagctacgcgtttttgctgaactacaccgcacagccgcaaaccgtcaccgtgcaaaagccgacgaaggagctgcttacacgcgaaacgctcgacggcacgtataccatggaaccctacggcgtgcttgtgctcgataaaccacaataaacgacaaaggccgttacgataaacattttgggaggaattcatatgaaagaggaagaaaaaatctttgccgggcagtttttctgccccggtcacccggacttgaaagccatcaagctgcgctgccacaacctttgcagcgcctataatgcaacgctcgaagacgaaaccgaaaagcgtaatgcaatcgtgcaccagatcttcggcgatttcggcgagggctcgtttgtgcaggggccgatccagatccactatggcacgcacacgcacatcggcaagagctttttcggcaacttcaacctgaccattcaggatgacgcgcccgtgaccatcggtgaccgctgcaacttcggcccgaacgtgaccatcgtcacgccgatgcacccgatcatcgcagaggaacgccgcgtgctgaaaacaaaggacggccgtgaaattcgcgtttgctacgcaaaacccgtcaccatcggcaacgattgctggttcggcgcaaacgtcgtcgtatgcccgggcgtgaccatcggcgataactgtgtcatcggtgcaggcagcgtggtaacgaaggacattccgtcaaacagcgtggccgtcggcaacccctgccgtgtacagcgcgccattacggaagcagacagcatgaaatatcatccggaacgcttcggcgaagatgaattcgtgtttgacgaataaactgagcttataatacgcaaaaacagctccgagcttttcgcccggagctgttctctattcaccttaattcgaattagaagtaaacgacctgattcttctctgcgctctcaaagatcgcttccatcagcttcatcagctggcgctgctggtcgtgcgtgacgatctgctctgcttcgccgttgacaactgctgcgatgttgcgataataatcgtgaatgtcgcagtcgattctcggcagcggaagctcgctgatcgtttccggcgttctcggcgccatagtcttcgtgaggcctgctgcggtgacgatcggcactgcatcgtgctcttcgtccgccgttgcgatgacgatcttgccgttgacctggaagtcatcgatgacagccgtgccgttcagaccttcgacataccaacgcggcaggttgataaagttgctcgtgccgacttctacggtgaacacgagatcgttatcaaacttgaacgtagcggtgaagccgtcgtccacttcttcgttcgttacgttggacagcgttgcgtaaacggaaaccggcattttgcccatcatcatgttcatctggtcaaggaggtgcacgccccagtcaagaaccatgccgccgccctgtgccttcgtgtttctccagtcgcccgggataccgcgggaaccgtgaacacgggactgaatggcgaaaacacgaccgagctggccggactttgcaatcttctccgcaacgcggaaatcctcgtcccaacggcggttctgatgcaccgtgaagacggagcccgtgcgcttggaggctgcgatcatctcttcgagatcagcggtgcaaagcgtgaccggcttctcactgatggcaaccttgcccgcttccataacctgaatgcaaaccttcttgtgctgatcgttcgggattgcgaccgttacaacatcaacggtcttgtcggcaagcaactcctcaaaagagctgtatgcgtgaataccgttttcctcagcagccttgttgcgctccggcttaatatcgtatacgcctgcaagctctacaacacccgggatttcctgcaatctcttcgtgtgccagccgcccatgccgccatagcccacgactgctactcttactactttagacataataaattggactcctctcgatttaaagtaaataacctatttgcgctctctaaactacgcgctatacaccttattatactaaaagacacgcaagtttcaagatgtttttatagatttttgcatcttgtccgcgatttcggcgaaagatacaaagaccacctgcgcaaaactgtgtataaatcccacgtttgattggaaatcggcgcaaaaggaatttagacccttgagttttttcacccgatgtgctacgatgaacctgaataacacgtgaatacaccggaaaggttgattatatctatgaaaatgtcatttcgctggtatggcccggacgaccccgtgaccctccaaaatattcgtcagattccgaacatgcaggccatcgtcaccgctgtatacgacgtgcccgtcggtgaagtttggagccgcaagagcattgccgcgctgaaaaaacaaacggaagataacggcctgcaatttgaggtcattgaaagtgtgccggtgcacgaggatatcaaactcggcaaacccacgcgcgaccgctatatcgaaaattactgcgagaacatccgccgccttgccgaggccggcatccgctgcatctgctacaatttcatgccggtgtttgactggacgcgcacgcagcttgaccaccgcctgccggacggctctacaagccttgtctactataaagagcaggtggatgccgtggacccgctgaaaagcgacagcgacctcacgctgcccggctgggacgcgagctacacgcgcgaggagctgagggccgtcgtggcggaatacaacaaaatgaccgaggaagacctttgggcaaacctcacttattttcttgagcgcatcattcccgtcgctgcggaatgtgacgtgaacatggccatccatgaagacgacccgtgctggagcattttcggactgccacgcattatcacgtgcgaaaagaatctcgaccgcttcctgaaaatcgtcgatgacccacacaacggcatcacgctgtgtaccggctcgctcggatgcagcgccgaaaacgatgtggtgcacatggcggcaaaatacgccgcgatggggcgcatccatttcgttcacgcccgcaacgttgccgtgctggaaaacggttttgaggagcgcgcacactactctgcatgcggctcgctcgatatgtatgccattttgaacgcgctctacaaaaacggtttcaacggttacatccgcccggaccacggcagaatgatctggggcgagaccggccgcgccggctatggcctttacgaccgtgccctcggcgccgcgtacttaaatggcctgtgggaagccatcacaaagcgcaactccaatatggagcgataaatttgagccaacaaaaaaaccgatgcagtcgaaactctgcatcggtttttttaatagataccgtaagcttcaccttctgttttaccgcagcgaacacaggtcttggggtagttgatcgtagcagctttccaatcatgtccaagcggctcgccttccgtcataccgcaatacacacaggttttcggctcggtgcaggtggcttccttccatttatgcgcacaggtgcaggtcgtaagaagaaagcataccaacagcatgaccaaaattactcgtccccagcgtttaagcattgcttttctctcctgtctctcctcttttcccaattttagatgaaatatatctaaaagtcaatagataaaatccgtctacatatactttgagtggataccactcaaagcaggtgaaaaaattgacggagaacagaatacgcgatctgcgggaggactctgatttaacgcagcagcaagtcgcaaatgcaatcggcattacaaagcgcaaatacagttatatcgaaacaggccagcagcagcttacggacgacattctaattaaactcgcaaacttctataacgtgagcattgattatctcttgcggcagacggcgaaccccaaacgaaatctctgacgtaaaattcccgaaaagtcgtttgttaggcttgacaattattcaaaaaaagggtaactttatagataagaacgccgacaaaaatgcggcgttttgtttccgtatgcaaaaacgcaaaagcactttgcgattatttgcaaatacactgacaaaaatactaaaacaaaggagtggagaaaatggacgctggcagtagtggcggtgcggttcctcgagaacagatgcagccgcccgcagaaaaacaggcgattttctccgcttgttttttgcgcgaccttacatttgtaaacggctgagttcaaaccgtatcgtccgattgccgatttttgcacgattgcagagaaaggacggacgaactatgttggatatattggacaaaattttagagctgctggaaaataaagatttcccccagttgggcaatcttctgaaagacatgaacccggcagacgtggcagaactttttgaagacctgccgcgtgaaaagatggcgcttgtgtttcgcctgctcccaaaagagcttgcagcggacgcgttcgcttatatgaatccggacgaacagacggtgcttgttgaagcattcagtgataaagagctgcacgacgtcgtgaacgagctgtatgtggacgacgctgcagacatgattgaagaaatgcccgcaaacctcgtcaagcgcattctgcgacacacggacgccgaaacgcgcgtactcattaaccagattttaaattaccccaaagacagcgcaggctctatcatgacgatggaatacgtcgatttaaagcgcggcatgacggtggaggaggcgtttgaccgcatccgtgccatcggcgtggaaaaagagacggtgtacacctgctatgtcacggacagccgccgcaagctgaaaggcattgtgaccgtgaaagacctgctgcttgcccccaaaaacgagctgatccgcaatatcatggaaacgaacattatttacgtttccacccataccgataaagaagaagtggcctccctgttcggcaagtacgattttcttgccgttccggtcgtcgataacgaagagcgacttgtgggcattgtcaccgttgacgacgcgatcgatgttattcaggatgaggcaacggaagatatcgaaatgatggcggctatcacgccgaccgataagccgtacatgaaaacgggcgtttttgctacatggaaaaaacgtatcccgtggcttttgctcctcatgatctccgctacatttacgggcagcatcatcacctcgtttgaagatgcgctttccgcttccattgtgctgacgggttttatccccatgctgatggacacgggcggcaacgcgggcagtcaggcttcggtctccatcatccgcggtctttccctcggcgagatcgaatataaagacatcgggcgtatcctctggaaggaggcgcgcgtggcttttttgtgcggtgtttcgcttgccgccgcaaactttgtcaaattgctgctcgttgatcgtgtgaccatcccggtcgccatcgttgtgtgcagcacgcttgttgtaacggtgctcgctgcaaagcttgtcggctgttcgctgccggtgcttgcaaagcgcatcggttttgacccggccgtcatggccagtccattcatcacgaccattgtagacgcgctttccttgctgatctatttccgcattgcgtgcgcggtgctgcatatcggttaactttatccatcaaaggaggctgctgttatgaaccaaaaagatattgaaacgcttgcaatcgcgctgccggaagacattttaaaggcaaaatggtgcggcgattttgaacgcgcgttccaccttatcgacctataccttgcaaacgagaaagtcccggcgtttatgaaaacacgccttgcactggagcgtgaggtcttgaaagcactgccgacgggctacacatacagcgaagaagacgctttggcgctcgtgcagaaggaaattccggatttcacgaaggcagagcttgacgcattgcgtgaccgcggcgccatcgactggatctacatcaacggcaaaacgacgtattcccgcacgttctacgatacgcttttgggcgtttacccggatatcgccacgcgtgcaggcaagccgccgaaggacaaaagtgatcgcgtggaatttctgcgccaaaatgtacgcgacatgaaaaaagacggcgacgcgctgtggagcattcagctgcgcgcccagttccgtctgcatgacgatgttttccgtcccggagaagaactaaccgtgcatcttcccgtaccgaagaatgcgatgaacatgcgcgacattgagatccttgcgacctcccaccccatttataagcttgcagatgaaaatgcacccgcgcgcacggtctcattccgcggcaaattcgagaaaaacgaaaccttctgggttgaatacaaatatctttcctatgtgaaatacaacaacctcgaatccgcacaggtcagtgcagagcagccgacgtttgacaccgaggagctttacccgcacattcgcttcacgccgctcatccgtgcgctttgcaaagagctttccggcgatgagaagaacccgcttctgctcgcacgcagcttttacgactactgcacgaaggtcggtacatattcgtatgtgcgcgaatacttcacgctgccgggcagcattccggattattacggcgcggggctgcacggggattgcggcgtgcaggcgctgctgttcatcacgctgtgccgctgcgcaggtattcctgcccgttggcagagcggcctgttcgtcacgccggacgacaccggctgccacgactgggcgcagttctacattgctccctacggctggctgtttgcagacccgtccttcggcggcagtgcgcaccgcatgggcgacagcgagcgcaacgacttctacttcggcaatctcgacccgttccgcatggcggcaaacagcgagcttcaggcggattttgacccgccaaagacacagctgcgcatcgacccgttcgacaaccagcgcggcgaagccgaatacgcagatgtcggcatccgctggatggacaaggagtgcgactggaagaccatcgaaatgaagaagctctcttaatttaaaacgttaaatgcccgccgtgcttttgcacgcgcgggtatttttgaccgtaaaggaacagatctatggaaacgaaactcgatattctgcggcgctatttcggttacacgtcctttcgccgcggtcaggaggaaattgtagacgcactgctcacgggccgcgatgcgctgtgcgtcatgccgacgggcgcaggcaaatccgtgtgctatcaggtgccggcactcctgctgccgggcatcacgcttgtcatctccccgctcatttcgctgatgaaagatcaggtggaatcgctgacgcaggcgggcgtgcacgcggcatacctcaacagctcgctcaccccggcacagtacagccgcgcactgcacaatttatccgaggggttgtataagctcgtctacgtcgcgccggaacgcctttcgaccgagaacttccgcacggccgtagagaacctcaatatttctctcatcgccgtggatgaagcgcactgtgtctctcagtgggggcaggacttccgcccggactatttaaagattgcggaatttgccgaaagtttgaaaaatcgcccgacgatcggcgcattcaccgccacggcaacaaaagccgtgcgcaaggacattgcagagcacctgcacctcattgaccccgtgcgtatcacgacgggctttgaccgcccgaacttatatttcggcgtgcagatgccgcacagtaaggcgctggcgcttttgacgctcatcgaagaacgcccgggcaaatgcggcattgtgtactgctccacgcgccgcaccgtggaagaagtggacgcgcttttaaacgacaagggtatcccttccacgcgctaccacgccggtctgccggaggaagaacgcaggcaaaaccaggacgatttcgtctatgaccgcaagcccattatggtcgcgacgaacgcgttcggcatgggcatcgataaatccaacgtgtcgttcgtcatccactacaacatgccgaaaaacctcgagagctattatcaggaagccgggcgtgccgggcgcgacggcagccccgccgagtgtattttgctttacagcccgcaggacgtgcgcacgaaccgctatttaatcgaaaacagcgacccgaaccccgacctcgactttgaaacgcaggaaaagctcatccagcgcgaatacgaccgtctgcgaaaaatgacatattactgcacgacggccgattgcctgcgcgcattcatcttaaaatacttcggcgagcccgccgaggaatactgcggcaattgctccagctgcgcgggcggctccgttttgatagaggccaccgtggaagcacagcaggtgctctcctgcgtggcgcgcaccgggcagcggctcggcatcagcatgatctgcgacattctgcgcggcagcgaaaatgagcgtgttttgcaaatgaatctgcaaacacagtccacctacgggctcatgcgcgaaaagccgatttttgaaatcaagcgtatcatcgacgcgcttttgatgcaggaattgctcatccagaccgacgggcaatacccggttttaaagctgacgcagaacgcgcggccggttttgctcggggaaaaaaactttgaaatgcgtattcccgtgccgcaggaaaaagcgaagaagccggacaaggccgcaggcgatgccgacccggagcttttcgcacggctgaaaaagctgcgtgccgcgcttgccgcaaaagcgagcgttccggcctacgtcgttttcaccgacgccactttgcgcgatatgtgcgccaaaatgccgacggacgaacaggagcttttgcaggtctccggcgtgggcgagcgcaaggcgcatcgctacggcaaggcctttttggaagagatcaaccgcaaagcggaggaagaataaatggaacaagcaaagcacaaattcaatcttgtcgaccacatcgaggtgcgcggtgcgcgcgtgcacaacctcaaaaacattgacatcaatgtgccgctgcataagatcgttggcgtagcgggtgtttcgggctccggcaaatcgtcgctcgcgctcggtgttttgtatgcagagggatcacggcggtatttggagtcgctttccacctacacgcgccgccgtatgacgcaggcggcacaggcgcaggtggacgaagttctatatgtcccggccgcgctcgcactgcaccagcgccccaatgtcccgggcatccgcagcacattcggcacgggcacggagttactcaacagcctgcgcctgatgtattcacgccttgcaagccaccgctgcccgaacggacactacattcagccgacattggccgtcgcggcgggtcagccgtgcgtgtgccccgtttgcggtgcggaatttttcgcgccgtccgcggaggaactcgcgttcaacagccaaggcgcgtgccgcaaatgtgacggcaccggcatcgtgcgcattgtggacgaaagtacccttgtaccggacgacaccctcacgattgacgaaggcgccgtgcgcccgtggcagacgctgatgtggtctttgatgaaggacatcgcccgcgacctcggcgtgcgcaccgacgtgccgttccgcgagctgacggaaaaagaaaaggacatcgtgtttcacggccctgccattaaaaagcacatgatctaccagaataaaacgagcggcgcagcaggcgaaatggatttcacctacttcaacgccgtgtataccgtggaaaacgcactctccaaagtcaaagatgaaaacggcatgaagcgcgtggaaaagtttctgaagaccgaaccgtgcccggactgcggcggctcacggctatcggaaaaagctcgcgctccgaagcttcgcggcatttctttagatgaagtctgccgtatgacgctcgccggcctcaccgattgggtcgcggacgtgccgggctcgctgcccgaagaaatgcgtcccatggcgcagagcatctgcgattcgtttacattgaacgccaagcgccttttggagttagggctcggctacttgacgctcgaccgcgccgcctccacgctttccacaggcgagcgccagcgcatgcagcttgcccgtgccgttcgcaaccgcaccaccggcgttttatatgtgctcgatgagccttccatcggcttgcacccggcgaacatcgtcggcctcaccggcgtgatgcacgatctcatcgacgacggcaactccgttctgctcgtcgaccacgacacgcagattttgagcgaggccgattggctcattgaaatgggcccggaagccggtgcaaaaggcggccatgtcatcgcggagggcacaacagacgacattaagataaacgaaaactcgcagatcggcccgtttttggcgggaaagcagggcatctcgcgacagaaagcacccgaaagcgagcttttccaaaacggcgctatccacctttccaccgaccgcatccatacggtgaagccgctcgaagtggatattccgaaaggccgcctgaccgttgttacgggcgtttccggctccggcaaaacgacgcttattctggaaagccttatcccggcgctttcggcgcatattcgtggtgaaaagctaccagcgcacgtgaagtcggtcagcgccgagggcatcgaccaagtgaagctcatcgacgctacgcctatcggtatcaatgtgcgctccaccgttgcgacatacgctaatgtgcacgatgagctgcgtaaaattttcgcccgcacgccggacgccaaaaaaagcaaatacaaagccggtgacttctcctacaacaccggcaagctgcgctgccctacctgcgacggtaccggcagtatcagcctggacgtgcagtttttgcccgatgtgaatatcccctgcccggactgccgcggcagccgttacggcaaagacgcatcgaagatccgctgcgtgacgaaaagcggcgaagcgtacaccctgcccgaaatcatggacatggacgtgcgcacggcgctttcggcctgcaaggactggaagctcgtctcgcagagattaaatgtcttaaacagtctcggcctcggctacctcacgctcggtgaggaaacgcccggactttcgggcggcgaagcgcagcgcttaaagcttgcgagtgagatgggcaaggcacagagcggctccgtgttcgtgttcgacgagccgaccatcggcctgcacccgctcgacgtgcagacactgctcaccgtgttccaaacgctcatcgaaagcggcgcgaccgtcatcgttattgagcacgacctcgacgtcatccgcagcgctgattatattctcgatatgggccccggcggcggtgaagcgggcgggcggcttgtcgcctgcggaactccggaacagatcaaaaacgccgcggacagcgtgaccggaaaatttatttaaaccaagcgcgtgtacccacaacttcgtgtgatgcacgcgccttttttattcgtcaaacgcttttcgcagtttttgcagcgcttttttctcaaggcgcgagacatagctgcgggaaatgttcagcttttttgcgatttctctctgcacgagcggccgctggcccgtaagcccgtagcgcagcaaaatgatctcgcgctcgcgcggcgaaagacgggtcttcaccgcgtcgtacaactgccgcaccttcatgcgcaggtcgatgtcctccaaaatgtggtcgtccgtcgcgatggtgtcgagcagcgtcagcgtgttgccgtccttgtcggtatcgatggggtcattcagcgatacgtcctgcgctgtctttttcgcgctgcggaagaacatcagaatctcattttcaatgcaccgcgaagcgtagcttgaaagccgaatgccctttgtcgggtcgaagctgtccacagccttgatgagccccaccgtgccaatggaaacgaggtcatcgcggtcattttcatcggcatagtatttcttcgcaatgtgcgccacaagccgtaaattgtgttcgatgagtttttgccgcgcgtggtggtcgcccgccgccatttgctccagatattttttctcctccgccgcagtcagcgcctttggaaacgacccggcgcttgtgatgtgcagaaagaaaaacaaaatcgacgataaatactccaaaagcccccaaagcatacccactccccctttagagaatggtatgcttcaggggcttttcttatgtcttttgctatatattatttgtggacaacatactggttcgggtcgccgagcaattccttcggcaagtggcttttatcgctgaggcgcaccgtttccacgctgccgtctttgccgatataaaattccgaaaccgaggtgttgccgccgatacgaatatcactcaaacgttcaatatcgtgctccaaaatctcacacgccatgcagcgcaacaaaaaaccgtgcgacgtgatgaccgctgttttgcccatgcaattcgctttcacgcgtgcaagcgctttttttgcgcggtcatagacttccgctgtcgtctctccctccggaaaaatgcagttttgcggggaattctgccacttttcggcaaataccggataatccgtaaacgctttgtcaagcttcatgccggacagcgcgccaacatccacttccatcagctccggcagttttatgataggcaaactgtggtacaaatccaccgcttccgccgttttatacgcgcgctttaacgggctcgaatacacagcatcaatggggatgttccgaaaccgcagtgccaaaagcgccaactgcttttctcctgtagcgctgatatcgaggtcaagttgaccctgaaaaatattctcgcggttgccgaggctttcgcagtggcgcacaagatataagtgtaatttttccatatcatttaccacggacgcatcgcaccggtcaattcggaaagggtcttcacgccgtttttatccatgtaattcgtaagcccttcggtaatcttcacgggcgcatacgggtctgtgaacaacacggtgccgatctgcagcgccgtcgcacctgcaagcagcatttccacagcgtcctgccacgtgctgatgccgccgagaccgacgatcggaattttcaccttctgatacgtctgccacaccatgcgcaccgcaatgggcaaaagcgccgggccggagaagccacctgtgttgttgtgaatgatcggacgcttcgtgttgatgtcgatacgcatgccggtcagcgtgttaatcatggagacggcatccgcaccggcgctttccgccgcgagcgcgatctcggaaatatccgtcacattcggggaaagtttcaccatcagcggctttttgcaatgcgcgcgcaccgctttcgtgatgtcttcaacgcctgcgcagctcgtgccgaactgcacgccgccctgcttcacgttcgggcaggagatgttcatttcgatcatgtcgatgtcggtgtcattcagtttttccgccatggcgcagtaatcctccggcgtgttgccggcaatgttcgcaatgatggtcacgccctgctcgcgcagccacgggagatctttttcaatgaagtgatcgacacccggattttgcagacccacggcattcagcataccgccgggggcttccgcaatgcgcggcgcaggattgcccggtcgcgcctttaacgtgatgcccttagaagaaataccgccgagtgcggagagcgggtaaaactctgcatattcgcggccgaaaccgaacgtgccggacgccgcaatgagcgggttatggaactccacacccgcaaccgaaacctttaaatcagccatcagaataccaccctttccgccgggaacaccgggccgtccttacagacatggcccatatacgtttcaccgttttcgtcgtaaagctccaccgcgcaaccgaggcacgcaccgatgccgcacgccatgcgctcctcaagggaaatttcgcacggaatgttgtgcgcttttgcaaactccgtcacggcgcgcagcatgaccttcggaccgcaggcaaaaattttatcggggtgcacatcctgaattaaatcgatgacgaggccgtggtggccgtagctgccgtcatccgtcgcaatgcgcaggtcgcagcctgctgcatggaagtcgtcttcgagaattacgaaatccttattgcggaaaccgaccgccaccgtggcgtttttgccgcattgccttgctgcgccgaaaagcggaggcacgccgataccgccgccgatgaacaaattgtgcgcgttcgggtcgaacgtaaagccgtggccgaggggcgccaaaatatccatcttatcgccgacctcaaacttcgagagctgctctgtacccgcgccgcgaatctggaacacaaagcgcagcgtgccgtttttcttatcgatgtcacaaatggaaatcgggcggcgcagcgttttaccgggcacgtaaatgtgcgcaaactgtccgggctgcgccacttctgccagtttcggcgctaagaccgtataatcaaaggtgttctctgcggtctgcgcgcggcgcagcacctcgcagagctgaacgtcatatttcatagcttgtcctttccgagcgttactcatccgttcgcgcgaatttcgccgatgcgtgcgcagatctcgtcgcgcatgcgaatggcttcgcgtcttgccgcctgtgcataatcatgctcgtcgcacttttccttctgccatgcgcacataatgccgcgagaggaattgatgatggcgccgagaccgttcttgtcaaacgccggggcaacgtcgtccgcgccgccgccctgtgcgccgtaaccgggcacgaggaagaacgtgtgcggcgctttctcgcgcatttcgccgagctgtgccgggtacgttgcgccgacgaccgcgccgacgccggagtagccgtatttacccataacgctttcaccccagtgctcgcagaattcgcccatggtttcgtaaacggtcttgccgctttccattttctgatcctgcaattcgccggaggacgggttggaggtcttcacaagcacgaaaatacccttatcttccgcttcgcaaacgccgagcagcggcttgatgccatccgtgccgaggtaaccattcacggtcagcgcgtccgcaccgaaggcttccgttttctcgccgaacacatccgttttgccgaggtgcgccgtggcgtaggcttccatcgtggtgccgatgtcgttgcgcttgccgtccgtgatgacgaacataccctttgcgcgcgcgtaagcgacggtctccgcaagggttctcacgccctgccagccgtacatttcatagtacgccgcctgcggctttacggccgggacaatatcgcacagcgcgtcgatgaggcccttgttgtattcgagcagtgcggcggccgcagcctccagcgttttgccatactttgcgacggcgccgtccagaatgtaggacggaatgtacgcgagcttcgggtcaagacctgcaacggtcggattctgggtttccacgattttttcaatcatacggtcaaaagacatagtaatccctctctcatttcaaatctataatttcaaatttctcaaacttttacagttcattaaatacaactctgccgccacagacggtcgcctttacgcggcccgtgagcgtcatgcccttaaacggcgtgttgcggcttttgccatgcagcttttcggggtccacaacccacgcttcgtgctcgtcaatcagcgcaatatcggccacttcgcccgcaccgatggcgccggcttcaatgccaagcagcgccgccgggcgcacgctcatcttttcgatgagctctgtaagcgtcaaaacgccggtctttacaagcgcggtatatgccgccgcaaacgacgtttccataccgatggagccgttcggcgcgtgcagaaaatcagctttttccgccggtgtgtgcggcgcgtggtcggtcgcgatgacgtcgatcgtgccgtcctttacggcctcgatcatcgcaaggcggtccttctcgctgcgcagcggcgggttcatgcggtagtccgcgtcgtgcttttcgagcgcttcgtcggtcaaaagcaagtagtgcggtgcggtctccgccgtcacctttacgccgcgggctttggcatcacggatgagcgccgcagaggttgccgtgctgacatggcagatgtgcaccggcacgtcatacgccgcagccgccgcaatttcgcgcgccgtgccgcagtcctccgccgccgcaggtacgccgggcagattgagcttttcggaaacctctccctcatgcatgacccactttttcgcgaggaacaaatcttcgcagtgcgccgtcacgcgcatgtggagcttcggcgcttcgcacaatgcctttacaaggcaggcggtatcgatgaccggacgaccgtcgtcgctcaaggcaatggcgccggcatcgtgcagcgcttctaagtcgcacagctcttcacctttcagtccctttgtaatcgccgccgcaacataaacatgcgcatcggcggtctttgctttgtccaaaatatagcgcacggtctcgggcgtatcaaccgccggcttcgtgttcggcatacacaaaaggctcgtcacgccgcccgccgcagccgcacggcagcccgtgtaaatatcttccttatcggtaaagcccgggtcacgcagatgcacatgcatatccacaaagcccggcaccgccgttaaaccttttgcttcaatgacttcggcatccgcatcgtacaggttttcggaaaccgcgctgatgcggtccccggagatcaaaatattgccgatataatcctcgccgcgcgcggggttcagaatgcgcgcaccgcggatcagcaagcgcttttgctcttgttccattcgtctcattcctttcgggtaaacagcaggaatttcaggatagccagaaattctcggcacagatttttcggcagacttttcaaattggtattcgcatgcagcggatacggcgtaagtcccaacatttttgccatgcggcaggcgcgccactggtggtaactttgcgttgcaagcaaaacggtatcggaaaagccattttcgcgcagaatatcccgcgcaaaacgcaggttttcaagcgtcgttttggagtttacttccgcaaagatgcgcttcggcgcaaccccgaactcaatcagcgcttcctttgcggcttcgccctcgctttgcggctcgtccttgccctgcccgccggtcgtgatacaaacggctttcggatgggcttttagatacgatgctgcagtatccacacgatattgaaacgcgcgactgaggtgcgcggggcaggttttcgatgcccccaccactcgtgcgccaagcacaatgacaacgccgttttcgggcaatttttttcttcggtgcatagtttctccttgtcgcatactgaatagccaaaacacctcataataattataaagaattcccccgaaaaccgcaagggcttcgggggaaaaagtttacatggtatgaaatctcatttaggccgcaggctctgcgattgtttcgccgccgtttgtgccgggatccggctctgcgggtgtctcatcgccgccggagggttcggagggaatctcttcgccgccggaaggctcagacggtgtctcgtcaccgcccgcaggttcagacggcgtttcgccgccggagggttcggagggcacagaaggctcttcgtagccggaattatcggagccgcccgaatagctgtaatcgttgctgtcggagtagctgtagttgttgctggagctgctctgggtaccgcttccgctgctcgtgtacgaggctgcggggtcgcccggcatagaagcatatcttgtgcggtccgcatccgtaatgttcgtatcggtcttcgagagcgttttgccgtccttaacagcctgcatcagctcttttgccttatttacggtgttataatccggacgcatgacgtaggcgtaatcgctcatggagtacgggatctgcgaatcgcccgtgccggtcacgctgcattggacaatgttccaagagccgttatcggaaagctgacggcgcacgagcgccgcgatgtcgtcatacggcacatccatctcgaagcagtccttgatgctgtccataatggagttgtagcgcaccagaatatccggggaaagtgccttatcgatgatagcggaaataaccttcagctggtttttaccgcgctgaatatcgccatccataaacgaatagcgctcgcgggcaaaggtcaacgccattttgccgtccatctgcaccttgcccaccgggtacgtgtagtcgccctttgtaaacgcaacatcgttatcgaccgtaatgccgccgagcgcatccacaatgccggtaaagccggagaaattaaggcggaagtagtaatcgatatccgtatcatacagcatttcgagcgtgcctatggaaacgttcacgccgtaaatccccgcatgtgtcagcttatccgggatgccgcccgaaacaggcagcggcacatagtagtcgcgcggggtcgtcacaagcagaatctggcgcgtttccgtattgattgtcgccaaaatgtttacgtcgctgcggccgaccgtgttaaggccctggcgcgtatcgctgccgctgatatacagggtgtaaatacgattttccgcatcgctgttgccggtgctctgcgccttttccgcttcgctctgtaccgccgtttccacgtgcagcacttcaagttcgcgaattttgctttctacatcggcgtatttatcgagctccgtcacaacgtcgaggtatgcagtatttaggatgatcgcaccgcattctttgttgagcaggccgtcgatgagctgtgtgatgccggcatacgtcttcgtcgtcactgcgctgccaaagcgctccgtgatctggctgacggcggaatcggtgctttcgcggtcaagtgattccaaaatgccgaacgtatagccctttgtgtcttccaacgcggaagccgggtcatccgtgcgcacatagaccgctacgggcgtatattccgtgcgcaccgtgccaatctccgtcagcgtgccggtcgcgaccgaaatgtagttgctcgcaagtccaagcaccagcgccagtaccagagaaagcgacgcgccgcagatgaactgacctttatttcggatgctgcgcaccaacaaaacagcagaagccaccaaaaggacaagcgcaataccgccaaggatcagcagcttcgtcggcatcatcttgctttgcagaaggatcaccataaacacggcaaacactgccaccaaaatgacagagatcacaatgcccgggatccgttccttccatttgctcatatcgtgtactcctttgattttgacgtttcgggaaaattcggcgcgccgcgcattccgcggcagtgccttatccgagttattatatcgcttttacccgttgtgcgtcaacggatttgaacaaaaagccgtcaaaatcagtaaaacgccgacaaaacatctgcatttttagctacaaggcactattttgacgaagccgtccgcactgcaaaaagctgctgcgggtgcacagccgcgtaaaaatcattcaggataaatccggcaaaatccgtcccgctctgcgtgagcgcgtcggcgcagtcgtttaatataccggccggagtgtagtcctgccgcacaacgagcaccgaaagatccgaaagcgcactgagcgcctcggcatcggcggaaagcagcatcggtggggaatcgagcaaaacgtagtcaaagcgttcgtccgcccgcgccgccaaaagcagctttttcagcttttcactgtgcaaaaggcgctccgggtgcgcggcaggcgcggtaaggccgagcgaaatgccgtatttttccgaaaaaataagcggcggctccgcgtctttctctgcctgcaaatattgcccgatcccgtttttagccgccgtgcgcaggccgaaaattttgtgcaatgccggttttcttaaatcgagatccaacagcagcacatgccgcccgcgcatggaaagcgccagcgccaaattcgccgctacgcttgattttccttcgttttctcccgcgcccgtgagcaacagaacttttttgccgtcccgccgcatgcggtgctccaacgccgcgcagagatcctgatacgcttccgtataggtgtaccgcacaaaagggtctgtcagcagcgccgcagccttgcgccccacaccgcggctcttttttacgaacagccgcttttccttgcgctcgtgcccgatggtgcccagcacgcgcccatccagcttgtgccgcgcggcctgcggagtttgcaccgtatcgcgccgcagaaacaaaaccgatacaatcagcgatgcagccagcatcgcacccacacaggcccgcatgcggtacggctttaagtccaccgggtttgaaggggcaagcggcacctgcgggtcgcggatgacgcgcagctcggcgtttgagaacagctcgtccgtcaggtctgcgtggttttccagcacatttttcagcgataaaaacgattcgcgcggattctccgccgtcacctgcacattgatgaggttcgtctccggcaaaacggaagccacaacgtcgcactgcgcagcctcgcggaacgtatcgctttgaaacacactcgcaaacacctgcgccatgcgggccgtgaggtctaaagaggtatacgcgctcgtgccgccctttacatttaccgccacggtcgccgaagcggtatacacagggtgatacgtaaaaagatgatacccctccacgcacagccatgccgtaagcaccgccaaaatcagcacccacagattatagagcagcccgcgcagcacgcacacagggtgcaggtccccccaaaaaaagcgctcgtccttcacgttttcccctcctccacgatcaccgtcaggcaggcgcgcacggtctctgtttccgtctctgccgtatactgcaccgggtaacagccgggctttgcggtatctatttgcgtcactgtctgctttttcgcctttaccgccgtgcctgcatggtcaaacacgccctccaaataggccttcggctcaaacttttcacctgccttcacatacacgattccctgcttcaggcgaatttcaagactgctgtcgctcagctgcatataaagctgcatctcgctctgtccgccgtaggaattcgtcacggataccggcagcgtgtacatgtcgttttccacaaaagtaatatcttcggtgaacaatcgaatacggtcggaaacgtcgccgtccattacgtcctccactgtgatctgcgccaaaagcgcgggcatctcgcccgtgcggtaggtcgacggtacattcagcgcaaagcgcggcggggtgtaatccgtataccgcaccgtgcgcgtgagcgtcgccgcgtggcagtccgcatcgaacaccacgtattttatgcgccgacggtcgccgtccaacaacgcggacatacccgcaatgcaaatctcatccgtcaggtctccgtcatgcgcgtcttcggcatgcagccccgcgcaatacgcgctttccggcgcggtgacgctgagcgcaagttcgccgtccgtttcgtccgtcaaaacgggcatggatgtatcctgcgcctgtacgcgcggcacggcaacccacaggtaaaacgtcagtgcggcgcagaacagcactgccattaccatttgaaataccctcatgcgattctctcctttccggcttcgccgctcagaattctgcgtgggttttcatgcagcatccgctcggcatacgcagcactgaagtgctccgtgagccacgcgttcacgtcctccaaaatcggtctgcggtacgcggtcccgtgcccgtcgctcgccacgcaaaaagccagatcgcgctccagcagcacccgcgcggtctctgccgccctgcgcccgaaagcgccgaaaataccgctgcgcgtcacctgcagcgcggccccccgctctgtccacagctccgcgcgccaaggttcgttttgcaaaatgacgtaccgctccggatgtgcgatgagcggcacatacccgtatttttgtatatgctcagtcgccgccgcgcaccattccgacgagtcgagcgggtcaaactccaccaaaaggaaccgactttcgccgagcggctgcacgtcgccgctttgcaggcggtcaaacagcgtgccgtccgccatcatttccatgccgaaaaagagctttacgggcagactttcccgcgcagccgccgcttttagacgctcaaattttcctaaatactgcgtcttcgtcacccccgccccgtgcggcgtgacggctaaagctttcgtgccatgctctgatgccatacgcagcatcatgagagacgcttcaagcgtttccgcgccgtcatccacgccgggcagcacatgcgcgtgtaggtcgatatagctcataccgtctcctcccgtgtgcggtgcgcgccgtaatggccgtagccgtaatgcccgtagcgaccgtattttccgtatccgtagccataaccgtacttgccgtaaccgtagcccgaaagacctgcctgtacgccgttcagcacgcagcctgcaacggtcacatcgcagcttaggagcttttcgatgcccgctttgatcttcgtccgcgatgcgcgatcctgctcgatgacgtacaccgccgcatcgcagctttccgccgcgggcagaatttccgcaaagcgcgcgctttccggggcaatgagcaaaacgcagtccgcgtcttctcgcagagaagcaatcgcgccgcgcagattttcgccaacagcgagcacctcgcgcggtgaaagcccgcggctgcacgcggcgtaacgatacggctctgcaccgcgccgatgcagcacctcctgtaccgggctgcacccaaaaagacacgcttccagtcccggcgagcgtttatccatgccgcgctttaaatctaaatcgatcagtaccacgcttttgcccatttcgcccagcacatgcgcggcagtcatcgccgtggtgcgcacgccttccccgggcagcgtgccgcaaaacaacagcaccttgtcacccgatgccgccatgcgacgttcaaggcgcatggcaagcccgcgcgcagcctcgcggtaatgctccggcacatgcgggttcgtaagggtgagcgtttcgcgcctacttttgcttcgctttttaaaaacgaccttcggcagcgtgccgagacacaaaagatgcagcttagatgcaatctcctcctcgcgccgcacggtacgccgtgtgcagccgtacagcaggatcagtcctgcgccaaaaagcaggccgtacgccgcgcccgtcaacgccgcacgtttgccgtcgaatatattatacggcgtgatcggcaggcttggggcgctcagcatatggagcttaatgtcgcccagcacgtagcgtgcggcctccgggtaacaatcaatagcggcgttcagaacattcaacgtgctttcggcatttgcacccgtcgcagtcagcgtgaacaggttggaatcctccactgcgctcgccgaaagcgaagctgtaatagaatccgtgccgagcgcctgcttgatgccatccgttaagagctcgctttcgagtatgtacgggaacgtgcgcgcgagctgcgaagccgtggcggtgttgtaataaaacccgtagctgaacccgccgctttccccgctgccggtggcgaccgtgaacgaagccgccgcgcggtacagcgggcgatacgcgcgctttaccgtgtaccacgagcccgcggcgcacagtaccgtgagcaaaaggcacgcccaccacagctttttcacaccgcgcagcacatcgtgcaaaagcgtgatgatgtcgatgggctccggcaccgcttgcttttccttttgcgtctcctccatataaacctccgaaacactttatttttcatataccgtaacgctttaaatgcctgtctgcgaatttcacgggcattatagcattttgcacccgatttctcaagcattttcgggatattgtatatatacaaatatcgcaaattccgttaaaaaatgaaaagaagcgacgcctcaagcgaggcgccgccaataatcgacaaattaaatttctattttagtttcaatcagccttccggctccagcacgccgtacttgccgtcgcggcgcttatacaccacgtcaatctcgccggtgtcgccgtcacggtacatgaagaacgtgtggcccagcatttccatctgcaaaatggcttcttccaccgtcatgaccttcacatagaacgtcttgcgctttgcgatttccggttcgtcttcctcgtccggcatatcgtagtacgtatccggcagctccacgggctgcatcttctgtgcgcgctcaaggcgctttttatttctacggatctggttgcccagtgccgccacaacatcatccaacgcttcgttcatttccggcgcagtggcttctgcacggtacagcatgccgcgctgcttaatcataatctccacggtctggcgattcttttccagcgttacggttacggtagcatccgcgtcttcatcaaagatgcggtcaaacttagagagcttgcgctgcaccagttccttaaaattctctctcaggttcacttttctgccaacgatcttgatgttcatacgtctaccggtttttcccgcaaaaagcacaaagggatgtgctttttttcatctacggaaaaaacacatcctttctgaaagactcggctttcattattcagcttacggcttctgccgttctctgtacctacagtataaatcatttgaacaaaaattgcaatagaaaaataaaattttcaagatttataaacaatttgtttgcgatttaaatttctcataaaacaaaaagcgccgttccgaagaacagcgccgtttctgctttactttagttgttgcgcgggcccttgcgggaataaccgccgccgcgcttattttccgcacgcttgaggtccgagatcttctcatcgctcatctgcttaaagcgggacatcatatcttcaaaagagccggagttttcgcgcgcacgccactcataatcgcccggtcttgcggggctctgcaccggggcagaagcttcgcggcggtgatagttgttctggcgcgggggtctgccgttctcatcgcggcggcgcggggggcgctgctgctgcgcgttttcgtctgcctttttcatggaaaggctgatcttgccgtcttcattgatgccgatgatcttgaccttcacggtctggccttccgtgacgaaatcgcgaatctcctttacgaagaccggggcaacctctgaaatgtgcaccataccggtcttgccgttaccgagatcgacgaatgcgccgaactttgtgatgcccgttaccttgccctcaaaaattgctccgacctcaagctttgtttcctgcataccctctaattttcctccgggatttcaaatttgttagttgttgccgcctacattgtagaacacacgctcgccgggctttacatagtccagttcgcggcgtgccaccttctccgcatagtctgtgttgtctgcgttctcttcattcaggtcatagcgcagctcgtcgttgacgacctgctgttccttaagctcgtttttcaactgctgcagttcgtcctttttctggctgatggagatctgctgcccgacgagcatagtgaccatgaagcacgcaaaacagaacacggcgacctttaaaaggaggctgcccttataacgtttaatcttgacttcttccatgggattcctcccctttccttatgccgagcgttcggctgcttttcttgttccattatataatgatgcgccgtcattattcaagtcctttttttgctttttttcgatttgttcagaaatgatttgtgttttttcccgctttttagcaatgcttccacctttttccgccgtccttgcgcgtatttttcaaaaattcggtttctaaagccgtgcaagcagcgctctgcatacggcaaaaagcggcaaacgccgtgcgtcaccgtgacctgcacgcataaaaagccgatgacttcgcaggcgatttgaaaaaagcgcgcgtgcccggcgctgaccgcaagggacagcaaaaacgtgacgacgacggcaaaaagacaaaacagcacatccgtaaccgctgccgcgattttgccgagagagaacagcaggcgcaaaaactccagcacggcaaacgcaaaccccagaagaacgccgcatacaaggcacagcaacagcgtttctgccggaatgccgctcattttaaaagccttttcaaaacgcccgtcgggcgcacgccgtctgtgtacgaaagcgccagcacgcggccctttacgagcaactcgcctgtttcggcgctcatattttcaatgtacagcccttcgcccttaatgtgcaaccttccatctgccgtctgcaccgtgatgagcgtctcgctgaaaaaatccacgcgcgtaacgccgcttgccgtaagacgcgagcggttttcaatgtgcaaagaatgtgcttttgcgcttgccgtctgtgccactgtatcaccgatcctcttttatgctgtatcgcctatttatatgcagcgattttcggaaaaagaccgaacaaacagcgaatatttatgcacaagagcagctcagcatgttaaaagcacagtcaaaaaacttacttttcttcaatgatctcgtacatcatagccgcttcgtctttttttgcatattcattcacggaaacgacgcgggccttcacggtgcgcgcgccgagcgtgagctcgatgacatcgttcaccttcacatcgtaggaagcgcgggcaatcttgccgttgacgacgactcggccggcgtcgcaggcttcgtttgccacggtgcggcgcttgataatgcgggaaactttcaagtatttatccagtctcatgttcaaactccttttctttaatatatggaggcagctgcctataacagaagaacggacccgcttcgggatccgttccatcacaaattatttgccaaaattacttattgacagattccttcagggccttgccggccttgaatgccggagccttggaagccgggatcacgatctcagcgctcgttctcgggtcacggccaacgcgctcgcctctctcgcgaacttcaaaggtgccgaaacctgcgatctgaaccttctcgccgcctgcgagggactctgtgatggaagcgataacagcggaaacagcgttttccgcgtctttcttggaaatggtagccttttctgcaacagcagcaatgagttctgttttattcattatgaataacctccaaatttttagatttatcttcatcacccacggcgcgaaccatcgccggagcgtgaattgctttattcttctgcgccgaactgctcaatgtacgcgcggcaagcttcagacagcgcctgctctgcatctacgccgagacggcgtgcgaactccgttaaattgaaaagcgctttgccaatcgattccgcgccgttttcttcggttgcatcgcttacagctttgcaaacgcttttgcgcaggtcatcggtcgagccgttatccgcgcccattttcgccgcctttttcagtaccttctgggtacgcatcaaagcgggcatggcgggcgttacgctttcaagcacctcgcggtcggacttctgttttttcgtctcgcgcttaatctgatcccagtttgtcagcacctgctcggtcgtgtccgccgtcacatcggcaaacacatgcgggtgacgctgcaccattttggcagcaacgtcgctgataacatcgtcaaggtcgaaccgaccggcttcacgctcgagctcactgtggaacgccacctgaaaaagcacatccccaagctcctcgcgcagcagcacggggtcttccgtatcgatggcttctatcgcttcgtagcactcctccagaaaatcgcggcggatgctcttgtgatcctgctcgcggtcccacgggcagccgtccggcgcacgcagaatcgtgatgatctctttgagatcttccagtgtataacgggattttcctacatatttcaacgcagctttcatattttaccctatccccctgttttttgcaagtatttttcaagtctttttgtaattttttctccgtttggcagtactttgatgtcttcttcacagatcccacgtgcaatcagcaggaaagcaacatagataagcgcccccaaaaacaccgcaggcaacgcggaaaaacgcgattccggcagcaccgcacaccatgctttgtgtgttaagagagccgccacgccacagcaaacggatgccagaaacggctttttaaaagtggaaaagaaatctattttcacgcctgcaatacgccgtatcgcaatgcacgccaacacacttgcgagcgcatagcacacgagcgtgccgacagcgccgccaagcacgttcacacgcggcacagcggcgagcgtgtaatcgagcacggcttttacgaatagcccaatgagcgtcagcaccacgggcagctccacatggcccatcgcctgcaagatgctgctcagcggcccgcacagcgccgcaaaaacggacgccgcgcccaaggtcgtcagcacgcgccccacgatgaccgtgcccggccgtgcaccgtagatcagtagtgcggcgggctgcgccaaaacggaaagtcccacccccatcggcagtgccgtcaaaaacgtgatacgcagcaccgcttccacggtgcgcttcagtttctgcgaatcccccgtctggaatgcccgtgtcacgctcggcagcgcgctgaccccgaacgactgcgttacgcttggcacgagcaaaaagagtgtcagcgccatattgtagcagccgaaaaggtagttcggcacggtttccggcgcggcgagattccctttggggatcgcgccagcgtacatggaaagcaacgctgcggggtctgtctgcacggcataggcgacacgcgtctgcaaaaatgacgcatcaatgagtccggaaaagctcatggcgactgccccaagcgaaatgggcagtgcagtgcgcagcaattttccggcccaaatacgcttgcttttcggcttcggcgcgcgttgcagcatcgcttttgtgacgccgtccctgcgactttggaagacaagcgtcaaaagccccagcaccgcgccgagcgtcacgccgaggattgcggcagcagcacctaaagcgcagacaagctgacagccatctgcttcacttttcacggtacagccgaataccgtgccgctcgcttgcagctcccgtgtgcccatatgcatcacaaaaatcgcgccggaaagcccgaaaataagcttgccgagcgattccgcaacctgcgaacgcgccgtaggcagcatattgcgcaggccctcaaaataaccgcggtacacggaggaaatactacacagcgcggcacacggcgcaagcgccaacatggagaaaagtgcgccggggctttgcaccaagcgcgtataaagcggtgcaaaacttgccatcagcagagcacagagaacgccgattaccgaaaacaccggcagcgccgccgctttgatttgccgcacgtcacgaaaatgtcctaaggcgtcctccgccgcagtcagccgcgccactgccacgggaaaaccgacggtggaaaggctgaacagcacgttaaaaaaactgtacgccgtgctgaaatatcccataccgtcttccgtgatgatactcgataacgggattttaaacaacgccccaatggccttcaccagaagaacgccgaacattaaaatgaacgcgccgtgcagaaatccctgctgcacgcgcgccgcgggccgtttttgctccataaaacccttccgtttcaaaaaagtttctcggcgaaagaaaaggaaagagggggcacctctttccttctggttttacatccttgcaggccggacccgcgttttcaattattcctcggtcgttttctcggtcttgacttcctcggtcggctcagccgtcttctctgtctcgattgtgacttccgtcgtctccggctctgcggggacttcggccttctcgactgcttcggcagcttcttccggctctgccggtgcgttctccagctttgcgccgcagtggctgcagaacatggaatccgtcggcatcttcttgccacatgccgggcaagtcactttatcctgcatggaagcgtactgtgcggaaactgcggaaagctgtgcatacagatcatcgataccggcgatctggtctgcaagctcggcttcgtctgcggaaccggccttcttggcctcgtaaatgaagcggccaagctcctgatagcgcttcgtaatctcgccgttcagctcggccatattgatgcgcagcttggacatatccacaaactggcctgccattttgcctacggtctgtgcagcggattttgcgttgacaacaacatcatcaaaaattcccataacaaattctccttttgtggtttggaaacggaaccttaaagaagcacaccgtttcatgtacctttcttcagtcccattatagcgcaatttgtgtcaaaaagcaaatgacaaaccggcaattttgtaaacaaaggttaaatttttcctgacaataaccttaattcgtaccgttttctactttcggacccaaaaattcacgcagcatggagtttgcaggcaccagctcggtatcaatgggctcaaagcgcatcagacgggcatctaaatcgcgcgccttacggtaacacgggttatcctccgggatttcgcgcagaagcggaatgacaagcctgcgcagcacacacggttcatagatatgaatggagttcaccgtgtagtccgcggaaaggcggtacgggcggatgtatttatcttcgcccgccaccacattatcccacatggcgatggtgcgctccggcatggtatcgcgggaacggatatcccgcgagatgcggcgcacaaggcgaatgtccatcggcgaaatgacctcgccgttgatgtccttgatctgctgcttcacgctgacatacagctttatggtgctgccctccggcagatcacgcgtaaaaatggggttcagcgcgtgcagaccctccatgataacgaacccgcggtcgctgacatcgagctttcttgccgccaatgttcgggtcttcgttgtaaaatcgtactccggtaaaaggcaggagccgctgtgaatgacggaattcaaacaatcctgaataagcgcaatgtcgagcgcgtccacggtctcatagtccttttcgccgttcggcagcacgggcgtttcgtccgggccaaggtaaaaatcgtcaagcgagacaatctcggcgtgcacaccgagcttgccgagctcgcgctgcaataaatgcgccgtggtcgtcttgccgctggaggacggccccgccagcatgcacaccttcgcggttttgtaatgcgtcacaatgttgcgcgcaatgttttcaatgtgctcgtgataggaatcctccacctcatcgatcatgacctgcgggttcaaaagcgccgcgtcgttaatctgctctaagtgattgatatatttaatgtaaccgcttgcgaaattgctcatattgcttcgcgatgccctcctttcgttcgagaatctccgggtaacggctgatatattcatacgaatatttgaagttaaaaatgcgtgaaagatcttcggaatacgggttcttaagcttcgtcacgccgcctgcgccgcacgccagcaccgtttcggtctcatccatcgtgaaaatattatatgcacactcggtgcccggctttgcccagcccgtattctccaaattgcccgccatgcggctttggcgatagagataatacggctcaagcccccgctctgtcagccgcttttcggcataagccatcatgcggtcggcaagcgcggcatcggcgtgggccttgttgatctcgccgctctgcgtgatgaacgaggagcgcttcaatgcgagcgcgtgcaccgtcacgttctcagggtcaagcgcaatgaccttttcgattgtgtcacagaatgtctcatacgtgtcgcccggcaagccgacaatgaggtccatattgatattcgtaaagcccgcttcccgcgcgaggtgaaacgcatccacagtctgctgcgccgtgtggcggcggccgatgttttcgagcacgttgtcctgcaaagtttgcgggttgatgctgatacgcgaaacgccgcttttaagcagcgcatccagctttgcacggtcaatggtatccgggcggccggcctccaccgtaagttcctcgcactgcgacatgtcgaacgaatctttcacaacgcggatcatctcggaaagctgctctgcggagaacgtcgtgggtgtgccgcccccgacatacacagcgcgcaggtttaagcccaaagcatcggcgactttcgccgtctctttcagttcttccaaaagcaggcggtgatattccggaatctgtttcttggccttttccacgctctgcgaaacgaatgagcagtacgcgcagcgcgtggggcagaacggcacggaaatgtacaaagagtagtcgttttcacgcactttatccgtaatgggcttttgtgcgcgcagggtgcgcactgcaagtgccgttttttcgtttgagacgaaatacttttcgcggaacagccttgccgcttccgcttcgccgtgctgttcggtcagctggcgcagaagcttaatggggtgaatgcccgtcagcatgccccagcgcggcattttgcccgtgtgggcgcaaaatgcatcaaataataaagacaccatgccgtattcggtctctgcgcctacttttgctttgcgctccgttttgccgtctgcgtcttcaatgcgcacgatatattcgccgttttcttcggcggtgtacaccgtgcggttttcatcgctcggcataaattcgtgctgtaccgtgactttgtcaaacgggtaaaacacgcggcagaggttttccgcctcatagtgataagggtgatcgataatatataaaaccatacattttcctttataaatacggatttcggcgcttttcgtcttccagcgtcgtcacggggccgtggccgccgcagatatcgggatttccgggcagcgccgcaagcttttttagagactcgcgcagctcggcactgttgccggttggcaggtcgcaccgcccgacggagtagcccatcagcgtatcgcccgtaaacacggcgtccggcgtaatgtagctcacgccgcccgcggtgtggccgggcgtgtgcagcaccgtgaccggcacttcgccgatctgaaatgtttcaccgtctttgaaagcctcgtgcaccttgcaggtgatggactcgtacatcatgagaagcgagccgttttgcttatcgtccgctgcaaacgccgcttccgtctcataggcgcacaccggcacaccgagcatctcgtgcaggcggtcagcctcccaaatgtggtcaaaatggccgtgtgtcagcaaaattctctgcaccgtatattttttaatttcatttaacagtgcgtcgttcaaaaagccggggtcaacgaccgccgcctgattcgttttttcgtcgatgagcaggtagcaattttccgaaataggcccgcccgttatacatttatatttcatatctttgtttacctttagctgcggtcaatagagattacgcccttaatcttctgcaagcggtcaataacggtctgcaggtgcgaaaggccgttgatggtaatcgttgccgaaatgacggcattctccgagtttttgatctcgcgggagttgagcgagtgaatgaaaatgtgcatgttgaaaagctgctgggtcacgtctgcgagcaggccggaacggtcggttgccacaatatgcagcgtagacttgaactcttccttgacttcacccgcccagtacgcacgcacccagcgctccggctccggcgcctgcgagaaatccttcggcacgttcgagcaactgcgtttgtggatggaaacgccgaaaccgcgcgtgatgaagccgacgatctcatcgcccggcagcgggttgcagcagcgggagaacttgatgagacagttgtccataccctctacgagcacgccgcctgccgctttcttgttgaggttcggtggcggggtctgctgcgcaatctcctgctgcggttcgggtgcaggcttgtgggtcttctggtattcctcttttacgcgcggcaggagcttccaaagctgaatgccgccgtagccgatggccgcgtaaaaatcatcgggcgtgacgcagctgtggcggcggccggcgctttccagcatgaactgcatcagctcgtcgctcatcacgatgccgttgcgcttaaattcgcgctccagctctgccttgccctctacgatgttctcatcgcgcttttctttcttgaaccacgcgcggatcttattgcgtgcttcgcttgttcgcacgatggaaagccagtcgcggttcgggccgcgaccgacctccttcgtcgtcaaaatctcaatgatctcgcccgtttttaccttgtaatcgagcggcacgatcttctggtcaacctttgcaccaatcatgcggttgccgacggcggaatgaatggcatacgcaaaatcgataaccgtagagcccatcggcaggttgataacgtcgcctttcggggtgaagacgaacacctcttccggcgcaagatcggtcttgatggagcgcacaaggtcagtgatatcttcactttcggactggttatcgagcatgttgcggatccactgcaagcggccctccagcgagtcgggcttttcgttgccgctcgtcatgccgagcttatacttccagtgcgccgcgatgccgtattctgccgtgtggtgcatttcccacgtgcgaatctgcacctcgaacgggatgccctctttgctgatgaccgtcgtgtgcaaggactggtacatgttctgcttcggcgtggaaatgtagtccttaaagcggttcggcagcggggtgaacatatcatggatgataccgagcacattatagcaatcgttgatggtatcgacgattacgcgcagggcgaacacgtcgtaaatttcgtcaaagctcttaccctgaatgaacatcttgcgataaatgccgttgacgctttttacgcgcccttcaatatatacgcccgggataagcggctccacacgactgcggatcatttctttcgttgtctcaataaactgcttgcgctttgtgctgcgcgcctcaaggttatcttcaatctccttatacgccacagggtcaaggtactttaaagaaacgtcctccatgtattccttaaccttgcgcataccgagacggtgcgcaatgggtgcgtacacctcaagacattccagcgccttgtcgcgctgcttctgcggcgccacgtattcgagcgtcgctaaattgtgcatgcggtccgcaaatttaataatgatcacgcggatgtcctcgctcatcgcaatgagcattttgcgcaggttttccgcctgctgctcttcacgggaggagaacgggatcttgccgagctttgtcacgccgtccgtcaggtttgcaatctccttaccgaacgctttcacaatgtcgtcatacgtgaccggcgtgtcctcaatgacgtcatgcagcagacctgctacgacggacggggtatccatgccgaattccacaagcttatacgccaccgcaatggggtggatgatgtatggctcgccggagcgccgcacctgtccctgatgcgctgcctccgcgaacttatacgctttttcgatcaacgcgaggtcatattctttttcgcttttttcgatcagtgacacaaggtccgcatacgtttttgctgcttctgccatcgtttttcactccttccgttcccttattgcagtgccaaaagcaccggggaacgtgtaatatctgttttgccgctcgtttcgatgagcgttgccgtaaatgtatcgtctgcaatttcgctgtgtaccaagccgcgctcctcaaatacaagaagcgccgttttaaagagtcccagtgtcatatcttttccaaactgcgaaacaaaccgaacctggtccgtctctttaccgttcaccgtgcgcagtgcgcggtaaatggccgctaagcacgcgcggtcggggtacaatctgtttttatcctccgcggaaagcacctcgccgcgctgccacttttcaaagctcgcaagcgacgctatattcttttccgtattgaacgctgcaaacttcatatcgcgtacgatgacggtcagcgacggctggccgcgaaattcgcgcgcctccagctgcaccgcaaggtcgatcttatcgccgatgtggtacggcagctcctcgggctttgtattaaaacgcatcgccgtgatgaccgcgccgttcttttctaaggtcaggcgcagatgccccccgccgccgaccggtgtgacattggaaagctccatgttgaataaaccgaacaccggctgcgggttgccgtttccaaacggctccaactgcgtcaggctttgcgccatggaaactgaaagcgccgccgggttcagcttgcagtccagtgtgaccgtctgcgtaggcatctgcgggaagtgctccgccgcataccgattgatgcgcttgcggaacgcttcgatgttttcgggcttcaacgtgatgcctgccgccatgggatgtccgccgaatttgatgagcaagtcgccgcacgcgcagatggcttcaaacagcgagaaaccctcaatgcttctgccgctgcccttcgcctctgtttcgccgcgcgaaatgatcatgcacggcttgccgcagcgctccgtcacacgggacgccacaatgccgataacaccatggtgccagttttcaccgtccaccacgaccacgcggtctttcatgtatcctttcgcttcgatatccgcaaacgccgcttcggcaatctctgcttccacacggcggcgttcctcgttatcggcgcagatttcctcactcagtacctcggcttcctcttcatagccgctgatgagcaagcgcacggcgcgttccggcgcgcccatacggcccgtcgcgttgatgcgcggcaccagcgtaaacgccacattcgtgctcgtcagtgtcttgcctgcaatgcctgcgttttccaaaagtgcctgcacacccgggcggtcgctctgtgaaagacgctcaagacccgcgcggatcagcgtgcggttttcgcccgtcaacggcacaatatcgccgatggtgccgatggccgcgagatcgctgtatgcttctaacagatcttccacgtcgcccgcgccgtcctccagcgccataagcaatttaaacgcgatgcctacaccggaaaaatgcttataggggcttgtgtcatccggtcggtatgcgtccacgaccgccacggcatcgggcaatatctcctgcgggcggtgatgatcggtgacgaccacatcaatgccaagctcgttcgcgcgcgctacctcctgcacggaggaaatgccgttgtcgaccgtgacaataagcgacacaccttgctcttttaagtattccacggcgcccatgttcatgccgtagccttcgccctcgcgctgcggtatgtagaagattacgtctgcgccgcgcgtttcaaggtacgaatacagcatggcggtcgaagtcacgccgtcggcatcgtaatccccgtaaaccgcgattttttccatgttgtccaccgcgtgggtaatacgcgccgcagctttgtccatatcttttaaaagaaacgggtcggagagcggctcgccctcgccaagaaattcccgcagatgcgcggcatcgtcaaggccgcgaatattcatcagcatcgcgaggaagaacggcacgccatacgtctgtgcaaacgccgccgcgcgttccttatcgagaggacgcacctcccattttcgcaagatcattttgcttcaccctttaaatcaaaagcccgattttccgcgcaaccccaactactgcacggcaaccgtgtcctatgtaaattcgtttcatttctaaaagaatattttagcatttttttgccggttattcaacagaatttcacaattatctgcgaaactgtttgtagaaaaagaaaaacacattctccatttgtcggcaaagcgacgaacaaagtctttgattaaactttcttcaagaaagtttacggattctcaaggcagtgccttgagtcgtcgtccgcagacgacgaaacacctttgcgttcgagaaaacaaggaacggtagtaagcaatgcttcgcattgctacgaaacttcctgtggacgttcaagtcgtaagaagccctgctgtatgggttttctgaacaagacaccaaagtgtcttgttttatacgcgctcggcgcagaattatttcccgaatttttgttgatttttcctgaagaaaaaagtcgataaattatagaaaacaggaaaggcatgtggtaaaatggaaatgaaagattctgtatctttgcagaaaagaggtgccgttatggaagaaaaaacacggaaacccgaaaccgccaagcagaccgctaaagaacaccatgtgccggagcacgaagacgagcaccaacacggcaacccgcaatttgcgcttaaggtgctgcttattctcatcgccatcattttggtgatcgttattttaaaagccagcggcgtaccgttcgccgtaaaagactggctttcgcacgtcaccggcgacatgatcgcgctacgctgaatgtactctccccataaaacacaaacccgccgaaacttttcagctcggcgggttttcattttgcttatttagttcgaagcgccactggtggaagattcggttttcggcgaaagcgtcacatgcgccgtgtagctgccggtcgcccagcaggaatccgcattgttaatcgtcaccgtcaccggcgcttccatgctgccgctcgggtctgtcaccgtggaaagatccaccgtacagaaaacggaatctcccgttagcttcgagatctgcgccgccgtgccgataatcttcagcgtgagcgtctttgtagaaagctctgcttccataccctccggcacgttgatgacgctgatgttgctcgtcagcacagacgtttccttgtaaccgttcaggttgaatgtaacggtcgcgttttccactcgcgtcacatttgtcacaccgctcggcaccgggatagccaccgtgaacgtgttgttttccggcgtaacgtccaagaagttgatcggcgtggagagcgtcagggtcgtgtactttgagaccgtttcaccgtcgccggcaatttcaatttctgccgggtcgatcgtgatgcggttcgaggcaaagctgtccggaacattgcgcacatccgcttccagcttgaccgtctgtcggctcgtcaccggaatggaaacctccaccgtgtcgtcgctcagcttcaaatagagctccgttgggtcaagtacattgccgttcgcgtcgtacaacgtcactttgcaggaaagcgacttcgactgcgtgagctcttcgctgaacttatattccaacacggcacgcgccaccttgttcacgctgctttccgggccggaaaccgtgataagctccgtagaaagcgtgggcgtagaaggcgcatagtaattttccgccgtagtgtactgaaaatttgtttccacagtgagctgcgtttctttatatttatcatacaccactgtgatctcggacggcgaaacgctttccacctcgtattcggcgagggtgttgcccttttttgctgcgcgcagagaaagcgtcgtctgttgcaagctgctgcccgtcagcatgctgacggaaggatccagcgtccccgtaacgccgatgtcctcactcgtcaccttacttgtgatgagtgagttgcccgtaatactcacatccgtcgcgctgctgctcatactgaacacgcgcacaccggcttcctgcgccgtatcggaaatttcaacgttaatcggcacattgcggattacggtcgcacggctttcggagttgctcgccatcatggcaaaccagacggccgccgcggcaaggaatgaaaagataagcaaaattgtgttattttcaaacacacgtaagcgttgttttacttcgtttctgggtttcttagacatttttgccatcacttcttcaccgtccttttgcttttcagcacgccgaacttacggcgcacggtggaagcttcttcctgcggaatgaggtacccctccaaaacatcacgcagcgtatcgcgcgtaaagcggcgcgccaaaacgccgtttacagccacggagatctgccccgtttcttccgaaaccaccacgaccacggcatccgattcctcactgacaccgagcgccgcgcggtgacgcgtgccgagctctgcagagaccgaagtgtttttcgtcagcggcagaatacagcccgccgcatgaatcatgccgtcgcgaataatcatggcgccgtcatgcaaaggcgccttattgaagaaaatattgcccacaatctggccggaaggctcgcagttaatctgcgtgccggtctcaatgatgtcgccaagcttcgttttgcgctcgaatacgataagcgcgcccattttgagctgctgtaaaatacccacgccgtctaccacggcgttgattgccttgcggatctgcgcgcggtcatagctgcggtcacggcctgttaccacagccgcaatagattgtccgacgttgttgcggcccacttgctcgagcgccttgcggatttccggctgaaacacgatgaggatcgcgacgaaagcgaactggaagaaatacgccagcacgcggctgaccatcaccagattaaaatacgaagaaataataaacagaatgacaagcagaaaaagtccctttacaagctgccccgcgcgcgtttcgcgtacaagcttgaccacaccgtagatcaaaaatgcaacgatgataatatcgacggcatctttaaattgaaaattcatggcaatgctcaccatccactcccaccaggaagcaatggcttcaaaaaccttattcaaagcattcacctctttgcacaggattcggcggtacatgcacacggtgcacatccgctccatacgatttactttttacaaaacctaaatgcgtactgtatatagtttaacacaaagaggtggggatgaaaagggggaattgtacgttttttcctgttcttttctgtatttttcgatttttatttacactttgttcatttttatttgacttttcgcgccgcactttcagcccggagcaaatagaccgtgcgaatcagctccgtaatgtccctgtcggtcgtgaacgcacccggcgaaacgcgcaccgcgccgccgggcgtttcaccgtccgttcccattttgcggtgtacgagcggcgcacagtggaacccacagcgcacggcaatgttccgctttgcaagtacctcgcccacttcttcactctgcatgccgcgcacgttaaagccgagcaccggcacaaagtacatcgtgtccggcattgcggtgtataaaacaacatgcggcatgtttttgaatgcctcgtatacgcggcgaatgtggcgcatttccctctcccgcagcatgtattcaccgttcgtacgcacaaaatccatgcccgcgccgagtgcgaggatgcccggcacattctgcgtgccgctttcaaggtactccggcatttcccgcggctggtctagctccaacgcgcgcgtacccgtgccgccctgtatcaggctttccagcttttcgccgtttttcgtaatgagcatacccgtgcccatcggaccgtataaccccttgtgtcctgcgcagcaaaggtaatcgatgccgtcgcgctccgcatgaatgggaatcaccccgccggactgcgccgcgtccacgcagatctccgcgccgtatatgtgcgcaagcgccgccagccgctccacaggcacgcgaatgccgaatacattcgaggcctgcgtgcagacaaacaaccttgtgttctcgcgcatcgcatgacggaacgcgtcgagcgtcgcgtcgttgtcgccgggcgtcacgggcacaacggtaaacgaaacaccgtgcgcctccatggctttcagcggccgcaaaaccgcattgtgctccaaatcagtcacaagcacatggtcgccacgctttaacgagtggataacgatattcagcgactgcgtgcagctcggctgaaacgagatgcactccggacccgccgcaccgaaaaaactcgccgccttctgccgcacatcgtagaccgcctgcgccgtctgcaagctcattttaaacccgccgcgaccggggttcgcgccgaactgctccagcgcctgcgccattttgcggcgcaccgaaagcggctttgggtacgtcgtcgcgctgttatcgagatagatcatttcttttcgccccgttccgcacggtagaacactttcacgcctgcatcccgcaaaatgcgctccgcttcgtccgtgcgctgcggaacatatacaccatagccgcagccgctttctcgggtgcgcggcagccgctcaatgtaggcttttatccctctttgaaaaagcagatcacggcttttcagcgcataggtcacgctgctgacgacaataagccgcttcccgcccgtgtctcttttgttttccattgcaagcacctccaagccttcaaaacagtctcatcaaaacagaatatgagacaagccgggaattggtgcaaaaaagagccccgccgaagcgaagctctcaaaacaatgcaaatttatttcagcaggcacaccgcatgcgctgcaataccctcgccgcggccggtaaagccgaggccctcctccgtcgtcgccttgatgctcacacaatcgaggtcgaggttgcaggcggatgcaatgttgcggcgcatctcatcgatgtacgggcgcagcttcggacgctgtgccaaaatcgtcgcatcgatattttcaattccaaagcccttgcggcgtaccgccgccaccgccactgcgagcagctttaagctgtccgcaccggcgtactgcgggtcatcatccgggaaaagcacgccgatgtccccgagcgtcgccgcgccgagcaaagcatccgctatggcatgcgcgagcacgtccgcatcggaatgccccaaaaggcccttttcatacgggatatgcacgccgcccaaaatgagctttctgttttctacaagcttgtgtacgtcataaccgtgaccgatccgcatagtaacactcctttacttttccgccgcaaaagcctctgccacaagcagatcctccggcgttgtgatcttgatgtttttgtaatcgcccggggtcaaatataccttgccgcccgccgcttcaatgagctgacaatcgtccgtatattgctttccggcgtttttcgcaaggcacagcgcttctttatacaaagaaaggcggaatacctgcggcgtctgaatggcacgcaaagtgcttctctccggcgtagcgcacaccgtgccgtccgccgcagcaaccttgatggtgtctttcaccggcaccgccagcgtcgccgcgccgtatttttccgcgtccgcgcacacggtttcgatttcctccggcgtgataaacggtcgcgccgcatcgtgcacggcgatatactctgcgtcaccgcaaagcgccgcaccgtttgaaacggaatcctgccgctccttgccgccctcggtaatcgtgagcggctttgtgacgaacgccgacgctttttggattgcatcgaaatcgcacgcacgcgccacaataacgatctttgagatgcacgcggcatgctcaaatgcgcgcagtgtacggctcaaaaccggctcgccgccgatctccatcatcgttttcgaagcgccaccgcttttcatacgtgcagagctgcccgccgccaccaaaattgccgccgttttcatcacgtttcccaccttatttttcaagtattcaaatgcgtttgcctaaaacgcgcctaaaatataaatacagtataccgcgatgtttaccgcgggtcaaggcaagataattttctctttcgacgttttttatcaaaaaagcattgaattcccgccgtcacctatgttagaataagcttgtatgtaaagattaagtaagaaaaaagaaaaaatttgaaaagcgagcgttttgcgcacacaaaggagctgcaaccacaaatggacattttctccgttattacactctttggcggacttgcgttcttcctctacggcatgcatttgctttcctccagccttgaaaaaatggtcggcggcaagctcgaacgtattttgcgttccatgacctcaaaccgcttcaaggcccttttgctcggcatgggcatcaccattgcgatccagtcctcctctgctatgacggtcatgctggtcggcctcgtcaactccggcatcatggagcttgggcaaaccatcggcgtcatcatgggctcaaacatcggtaccaccgtcactgcgtggatcttaagcctttccggcatcacgagcgacaacgttttcgtacagcttttaaagccggagagcttttcgcccatcgtggcgctcatcggcatcattctcatcatgttcaccaagagcagcaagaaaaaggacatcggctccgtatgtgtcggcttcgccattttgatgaccggcatgaccatgatgagcggtgcggtaaaaccgcttgcggatttgccgcagtttaaagaggtcttaacgattctcgataaccccatcatcgccattttagtcggcgcaggcatcacggcactcatccagagctccgctgcttcgctcggcattctgcagtccctcgccatgacgggcagcatttcgttcagcatggcgctgccggtcattatgggccagaacatcggtacatgtatcacggcgctgctttcctccatcggcaccacaaaaagcgcaaagcgcgtgaccgccgtgcatatctactttaacgtgctcggcaccgtcatctgtctttccggcttttatattgcaaacagcattttccatttcacattcaccgaccagccgatctcctcgtttatgatcgcggtcgtgcattccgcattcaacctcatcaccacgttcattctgctgcccttctgcaatcagcttgaaaagctcgccgttatcaccgtgcgtgataagcgcctgaagcccggcaagcaggacccgcacgcggttttgctcgatgagcgtctgctgctctctccgtccttcgcaattgcggagtgccgcaatgccaccacaaaaatggcaggccttgtgcgcgacaccattttggatgccatcggtctgctctcgcattttgattccgccacagcagaaaaaatcgagaaaaacgaagaaaccatcgaccagtacgaagataagctcggttcttacctcgtcaaaatttccagtaaaaacctctccacgtccgacagcaacgatgtttcgcagctgttgcataccatcggcgatttcgagcgtatcggcgaccacgcggtgaacctcctgcgcgttgcacgcgagattcatgataaagatctgaaattctccgaaaaggcccagcaggagcttgaggtcttcacaggtgccatcatcgagattttgaacatcacgacagacgcgttcgtcgaaaacaacttacagcttgcctacgaagtagagccgctcgaacaggtcatcgattcattgaaagttgaactgaaaaaccgccacatccgccgcttacaggaaggcaagtgcaccattgagctcggcttcgtgctctcagacatcctcaacaatttcgagcgcgtttccgatcactgctctaacattgcggtatgcctgatccagatcaaggattccaccatggacacacacggttacttaaacgagatcaaaacctccggcgacccgcgcttcaccggctattacaaccgcttcacaagcaagtatacactaccggaaagccgccacaaaaaggccccgcaggaagtacctgtaaaaagctaaccgagctatttaaaaccgcatagaaaaccgcatagaattttagccctccgtatttgtttgcggagggcttttctcatttcttctgtgcctcgtatttgcgctttgtcgccataccgccgcggatatgtcgctgggctttattcaccgccagtacgctgctcacctctttgtaaagccccatatccacgctgcgcagccgctcggcaacgtccttatgtacggtggatttactcacgccaaactgctttgcggcacggcgcacagtagctttgttctctacgatatactcccccagcatggcggctctgtcctcaacattctgcttcatcgtaacacacccttgtctgtgatacttgtgctgcattatatgttgagcttttctctaattatacctctttttgttttgaaaaagaatttaaacgctcatcaacacatggaatcaattgttattgctctaccatgcatcccgatattcattcatcatgatccgctttttccttgagataccctatgaaaccagaaccacttgcccagcaggcaggtcttttatagttatcgggactcctgcatatcaattagaatggatttctttttgcgtgtgccgtaccattaaacaaaatatcatcagagagttccaccaccatatgcaagtcgctgggagattcgacttttttgcctaaaaccactacattgtcaaaatagatatttcgggggcgactcatttccgtatgcatctcaaaaccgcgaataatagaaacagggaaattaccattcagaatttccacgttacggaaatatatattttcgacacttccgcgttttcgatccaatgagtacttggaatccaataccttgatgtcgacaaacttttcctgagcatcttcaacgcggatatcttcatacacaatgtcatgaatgtgagcgcgatctgcattgtggatggtcagcacgccgccagactgattaccctcatactcgcaatgaacgatgtccagatctcggaatgtgatgtcgctaatctcatcgcagcgcacttcatatccgatttccacggcgttaccgggctctgcattccacaaaacgcagtgttctaccagaatattcttcacatccctattggcagcagggtcgggataacttgcagctttgatgcacacgcagtcatccgaagcgcgaataaaggaattacgcatggttacgtcttcgcagcctacaatatcgatgccgtcacccgtgcaaactcgagacatgatgtttacatcctcaatctccacattccggcaagcgccaggaaccaggtgccacgaaccaccgtccaccatggtgatgccttgaatcttcacatcatcgcaaaacaccatccgaatcattggtctgccgccaccgttttcttctttcggatgccatacacaaccattcagaatgccgtttcctaaaattctcatgccgtgggcgaaaaaagcattcacgcaaccacagacaacgctgccctcttccaagaaaaccgtttcttccgctttgacctctaacgtgccaacattgtagactttcccactctcaaaaagatgatccactttttcgggcttcgggacacgctttgtgcacaagatgaagagcggtgtcttcaaattgccatctaactccaaggtgaccttactgggcttttccagctggaagctcaactctcggccggaaatctgagcctgaacattggtcttggccggacggaaaaccgccttttggaaatctttggatacttttacctgaaaacttagcggagaatcgtcgtccacaaccggaattacgtaatcaaaactatccgtgtggtaaaccgtcagctcctttccgccgcaaagcacagtgtacaaaggagatttttccagttcctcaactttatacaacggctccgtaattcttgcaggattgggattgtaacgcacagccacttttactcctccttaaaataatggtttttcctttatggaagtgattatagaatatcatgtctgaagaatattgaaaacaaacaattttttcttttattcctacaaaattaagcttttgacaaattttattagtgaaaacataaagaatcagcctgtatttatgccggaattacatcattcacgataagaaagtgtaaaagcatcatgtggcagtcggtatacaggagcttcagcataagtttaggctacaatatcttgcgccgcaaactcggagccaactgtacagttttaccgatataaagagtcgcttacaataaggaggtaatcgagaaaatccactgcctccgcaccgcagatatttcattcatattatatcaatttttcaaacatttgtcgagtatattttatcttattttctaatttcacttcattgccatactctattaaaggttttatagtatagcaaacggccatctgcatcactgaacacagctttgtattgttttcggatatattctttttcgcgattatcccacaagatcggcaccgatgtgatgtcaataccgcacattataacgttgagcttttacacaattatgcctgtttttcaatatagcaagacccccgatctgcattgctgcaaatcgggggtctctttatttcagcggtttacgccgcttttgtacggttcagtacagacggaaaattccttgcggaattattcctcctcagaagccatgtgtgcgaacttctcgtacttctcttctgcgtacttctcagccttctcgaagagctgctcggctctctgcgggaatgcacgggtaaggctgttgtaacgaacctcgcccatgatgaagtcacggtaagaagcagacggcttcttgctgtcgagctggaacgggttctcaccgttgtcagcacggcgcgggtcgaagcggaaggtatgccagtagcctgctgcaactgccttcttctcttcgttcatggaaacgcccatgccgcccttgatgccgtggttgatgcacggtgcgtaagcgataacgatggacgggccatgatagctctcagcctcatgcatagccttcaggcactggttcatgtcggcgcccatagcgacctgcgcaacataaacatagccgtagctcatcatgatggaagccagatccttcttcttcacagacttacctgcagccgcgaactgtgcaacagaaccgaccggagtagacttggaagcctgtccgcctgtgttggagtaaacctcggtatcgaagaccagaatgttgatatcttcaccggaagccagagcatggtcaacgccaccgaagccgatgtcgtatgcccagccgtcgccgccgaagatccacatggacttcttagcgagataatccttatccttcagaatctcggctgccttctcggaggaggaagcctcaagagccgtgatgtaagcctcagccgccggaccgttttcggcgcggtcagccatggtctcaacccacttctcagctgctgccttcagctcttcgcttgtgccttcttctgcaacgagctccttcgtgagctgctccagacggccgcgaattgcgttctgtgcaagcgtcatgccaaggccgaactcagcgttgtcttcaaacagggagttctgccatgccgggccgtgaccctgcttgttgacggtgtacggcgttgccggtgcggaaccgccccagatggaggagcagccggtagcatttgcaatgtacatcttgtcgccgaacagctgggtaacgagcttagcgtacggagtttcaccgcagccaccgcatgcgccggagaactcgaggagcggctgcttgaactggctgcccttgaccgtggtgtccttgaacttagcaagaacttccggcttcggatccagcttaacgccgtaatcgaatacttcctgacccgggcgctcgttgtcgatcggggacattgcgagagccttgttgcccttcatgcccgggcaaacctgtacgcaagagccgcagcccgtgcagtccagggtggaaatcgtcatgacaaagttcatgcccggcataccggtcatggccttgctcttcacagcagccggagccgctgcgagctctgcatctgtcatcggcaccggacggataaccgcgtgcgggcagaccatagagcagaagttgcactggatgcagttttccgggatccaggtcggaacgtcaactgcaacgccgcgcttctcgtaagcagcagtgccctgcggggaggtgccgtctgcatacttttcaaaagtggaaaccggcagatccttaccgtggaaggtgttaaccgggataaccacgttgtttacatagtccacgagctccggacggtcgccggttgcaacgtgcttcgtggaatcgtccacagcgtccttccaggaagccggaacatcaatcttcacgtagccgttagcgccgcgttcaatagcgtcatggttcatcttaacgatggcgtcacccttcttggagtaggacttcgtagccgcatccttcatgtagcggattgcgtcttcctccgggatgatcttcgcgatggagaagaatgcggactggagaaccgtattgattctggtgccaagaccgatctccttgccgatcttgaagccgtcgatcgtgtagaagttgatatcgttatcagcaatgtatttcttaaccttgcccgggagcttctcgtcaagctcttccggcgtccactggcagttcagcaggaagctgccgcccttcttcaggtcttcgaccatgtcataggtgccgaggtaagccgggttgtgacatgcaacaaagtcagcctgggagatgtaataggtggacttgatcggcgtatgaccgaaacgcaggtgggacatcgtcagaccgccggacttcttggagtcgtagtcaaagtaaccctgtgcgtacatatcggtgtggtcgccgatgatcttgatggagttcttgtttgcgccgacggtaccgtcagaaccgaggccccagaacttgcaggactttgtgcctgccggtgcggtatccgggtgctcgtttgcttcgagggacaggtgcgtaacatcgtccacgatgccgatggtgaacttcttcttcgcatcgtcgcccttttccatgttgcggtatacagcgatgatgtcagccggcttcgtatccttggagccgaggccgtaacgaccggtgagaaccttagcacagccgaactgcgtgccgttgatagcagccagaacgtcaaggtacagcggctcgccgatggagcccggctccttcgttctgtcgagcacggagatcgtcttaacggtttccggaagcacgtcaagcaggtactttgcaacgaacggtctgtaaaggtgaaccttaacaaggccaaccttctcgccagctgctacgaggtaatcgatcacttcttcgatggtctcacagacagagcccatagcgatgatgaccttctccgcatccggagcgccatagtagttgaagggcttgtaatcggtaccgatcttctcgttgaccttgttcatgtaatcgacaacggtctccggaatcgcatcgtagtacttgttgcaagcctcacgagcctggaagaagatatcgccgttctgtgcctggccgcggagaaccgggtgctcaggattcagagcgtgtcttctgaactcgtttacggcatcccaatcgagcatctcgccgagatccttgtagtcccatacttcgatcttctgaatctcatgagaggtacggaagccgtcgaagaagtgcaggaacggaaccttgccgtggatagcggaaaggtgagccacagcgccgaggtccataacttcctgcgggctgttggagcacagcattgcataaccggtctggcggcatgcatagacgtcggaatggtcaccgaagatgttcagagcgtgggtagcaacgcagcgagcggaaacgtggataacgctcggcagcagctcgccggccatcttgtacatgttcgggatcatcaggagcaggccctgagaagcggtgtaggtggtggtaagagcaccagccgccagagaaccgtgaactgcaccagcagcgccggcctcagactgcatctccgttacgcgtacttcacggccgaaaagattctttctgccggcagcagcatacttatcggtctcatcagccataacggaagacggcgtgatcggatagatcgcagcaacgtcggtaaacgcataagaaacatgcgcggcggcgttgttgccatccatggtcttcatttttcttgccatttaactaattcctcctttaaggattatcaatggatttacctgacggcgcagtaccccgttcaccgccctgccgtttgcagaactctcccgtaagcacctgtcgtcgttcaaaacaaattttatcattttttcgcctatatgtaaaggaaaaaacgaggattttttgaaatttcttctgaattaacagagattttcggcattttttatttttctccgcttcgcctttcgcccttttcgtcgttctccctccgctttgtccgggattcggcgcgcctccagcataaaatattgacaacagcgtttttttgcggtaaaattttaataattatatatcggtgagcagttagttttagctaaacatcacgtgacgcttttgaaaagaaaactcgctttttcatattgcgtttttctttgacttttgcggaaagcgacttagggtgctttcctaagaactcgcaaactttattctcccgccttcacgaaagcacattcaaaaccatttcactgctcccaaactttcagaaaggatgcttttttcactatgaacgacgacccttacggcaatttactgccgtcctcgtccgtcttacccctccccctcgccctgttgctgtttctgctctttttcgtgcttggcgcgcttttcgccatgtgcgaatccgctgcggaaacggctaacgaatcccgcatcaaaaaagatgcggagtccggcgaaccgcgcgccaaaaagctgctcgagtatctcgaacgcagcgcaggcatcatttcgcccctgcaatcgggcatgatgctcatgggctcctttgctcttgcggttgcggtcaccggctttgcgccgcacctttacaacgtattcatccgcgccgcgctccccacggctgccgctgccgtgctttcggcactgctttgcacattgctgtgcgcaggtctttatctaacggcagcagacctcgctccgaaaaaattcgtagcgcacaaggctgcacacggcatgcagcatacatacaaactctgccccatgctgtgcgccctcagcgccgtcatgcacccgtttgtcctcttgtgcaacctcatttcggacggtctcatgcgtcttttgggcaacgaccccaaagcgcttgatgaaaccgtcaccgaagaagaaatcctccacatggtcggcgaaggcgaggaaaaaggtgttatcgaagaaaatgagcgcgacatgatcacgaacattttcgatttcaacgacaccaccgtcaccgagatcatgacacaccgcacggacatctgcgccatcgatgaggagagcaccattgctcaagccgccgtacttgcggtggaaaacggcttctcccgtctccctgtctaccgcgaagacatcgataccatcgtcggcatctgctatgttaaggattttctgccctacgtcaaccagcccgtaccggatttcatccatttaaaagacatggttcgcccggcgtatttcattccggaaacgaaaaagtgcagccagctctttaaagaactcaaggagcgccgcctgcagatcgccatcatcgtcgatgaatacggcggcacggcgggtctcgtcacactcgaagacctcatggagtccattttcggcaacattcaggacgaatacgacaacgagcaggaagagatcttccgtgtcagcgaaaacgagttcaccgtggacggcaccacctccatcgacgagatttccgaccttaccgacactgaactgccggagggcgattacgataccatcgccggccttgtcaccgaccttttaggccgcattccaaaagaaaacgagcaccccagcgtacaggtctgcgggctcaccatcaccgtacttgaaattgaagaccagcgtctttcccgcctgctgatcgtgaaaaatgacccccggagaacccccgaagaagaaacacacgaagactgatgttttttgaaaggagcgtccctatgacattttccgaagcattctacggcacgtacaaactcgacaaaaaagacggcaaaccgcacttaaaggagcgtatttttgccccggtggacggcttttggagcggcgtcatgatctttggcggtgtggtcggcacgatcattctgctcttgacctttgccgcacacgtgcaggtcgccctcggcaccttcgcgcacccggccgaaaacggcgcgctcacgcccgatgcacagtatacgctgtggggcgtgctcgtcgcgttcatctttgcgtttttcgtgctcgccattccgcgctggttcctctgccgcggcaccatgcagttcagcttcatcggcgcatttctcatcctgctcgcggcgcagctcatctccgcgttcagcctgaataacacgacacccgatgtcggcaatgtgctgtgggtcatcgtaacgggccttctgctcgtgttcctcatcacatgcgccgtgtgcaccgtttcggcgggcctaaccgcgctcgtgaactacttcatcgcgaagtaccgtatggcgcacgcaaagcctgtcaccacataaatgcatgatgaccataacctgactttttcacagatcggcagatacagaaagccgtgctgtcgccctaataagagggggtaacagcacggcttattttttcagttctcaaaccttttcttcatatcctaacagacgccaagaaaatctcataggcatcgttaaaagagtcatacggcgtagggttgccgccgtttgtgctcttgcactggttgtcggagtattcctcgcccacagccaaaagctcgccggggtaaagctccacgcccgattcccgcgccagcgcgcaaaacgagagaatcggctccttgttttcgcgcgttttaagcagagctttgcgcaaagtctcgtccttttttgcaagttccgtcaacctttcgagcttttcaaatgtgttcataagcgcccctcgcttcaccaaatggataaattcagtttagcaaagttcggggtcgttgtcaaacgctgttttcaggcaatcggaaagccgctccgtctccacttgcgcagcgtctttcgtgcacaagttttccgcgaccatcgcgtctcccacagcacagaaatagcggtataagctctcggtcatcgaagcctcgcggctcattgcgtgtcggcgcataatggccttatccgcctgcacaaaataccaaaaggactccggcacgccgctttccctctcacagcagacagatcgccacacttccgccgtgtcttttctgcccgtcagtgcgtttaaaaacgccgcttccgcttctgtgatcgtcttgcgcgccgaaacacgcgccgcaaacgaagccgtatcctttaaaagctgttttcgcaggtcacaccctggcttttcgtcgccatcgagcagcctttcttcaatgagatcacagcagttatatagctgctttaatatctcctttgcgttcaaaatcataattactctccccgcctatcaagcgctttaccttgcatttttacattatagtctatttaacgaccatagtcaagaacagagcgattgcataagataaaggtacatagatattttatgcagggaaagcgaggggaagctatggtcgtgtacacgcccttttggaacacgctgcgcagctcgggagaatccacctatacgctcatcaaaaatcatcacatctccagctccaccatcgataagctgcgtcataataagccgctcaacaccaccacagtcaacgacctctgccgcatcttaagctgcaaagtggaagacatcctcctctacattcccagcgatgacgaccagatcttataaagcaaaccccgggtataccaagccataagaacagtcaatatatcccgagatcctattttacgcaaaagtgctcccggtcacgcgaccgggagcattttttatgctttaatatgcgattttcagaagcaactcttacttggaagcctcttcaacagcaacagcgcaagcaacggttgcaccgaccatcgggttgttgcccatgccgatgagacccatcatctcaacgtgtgccggaacagaggaggaacctgcgaactgtgcatcggagtgcatacggcccatggtatcggtcatgccgtaagaggaaggaccggcagccatgttatccggatgcagcgtacggcctgtgccgccgccggaagcaacggagaagtacttcacgccgttctcattgcaccacttcttgtaggtacctgcaaccgggtgctggaatctggtcgggttcgtggagttgccggtgatggaaacgccgacgttctcgagcttcatgattgcaacgccttccggaacgttatctgcgccgtagcacttaacgtccgcacgcgggccgttggaataagccttttcgctgacaaccttaacttcttctgtgtacggatcgaactcggtctcaacatacgtaaagccgttgattctggagatgatgaacgcagcgtccttgccgagaccgttgaggataacgcgcagcggcttcgttctgaccttgtttgcgttcagagcgatcttgatagcaccctcagcagccgcgaaggactcgtggccagcgaggaatgcgaagcactcggtctcctcggaaaggagcattttgcccagattgccgtggccgaggccgaccttacggttttcagcaacagagcccgggatgcagaatgcctgcaagccgatgccaatagcggcagcagcgtcagcagccttcgtgcagcccatcttgatagcaatcgcgcagcctacggtgtaagcccactttgcgttctcaaagcagatcggctgtgtttcctgtacgatggtgtacgggtcgatgcccttctcttcgcagatggtcttgcactcatcaatggaattgatgccgtattctttcaggacggagaggattttcgcctcacgtctctcataaccttcaaatgtagccatttctcgtgccctccttattccttgcgcgggtcgatgtacttaacggcctcattgaatctgccgtatgtacccatagacttcttgtacgcctcgttcggctccatgccggccttgatgaagtcggtcatcttgccgagggaaacgaactcgtagccgataacctggtcgtcagcgtcgagtgccattctggtgcagtagccttcggtcatctcaagataacgaacgccctttgcctttgtgccgtacatggtaccgaccatggagcgtgcgcccttaccaaggtcttccatgcctgcgccgataacaagaccgccctcggagaaagcagactgggaacggccataaacgatctggaggaacagctcgcgcatagcggtgttaatcgcatcacatacaaggtccgtgttcagagcttccataacggtcttgcccgggaggatttctgctgccattgcagcggagtgcgtcatgccggagcagccgacggtctcaacgagcgcttcctcaatgatgccgtccttaacgttcagggagagcttgcaagcgccctgctgcggtgcacaccagcctacaccgtgggtgtaaccggaaatgtccttaacttcctttgcctgtacccacttgccctcttccgggatgggagccggaccgtgcttcgggcccttggctacaatacacatctcttccacttctttggaataattcataagtggtactcctttcggttccagttttatttggcagacttcgcgcagaagagagccgcagcgaaaaagcgccgcccgcatcccgcaaaaagccattttactgattttcttcattatagctttttttcatgcgtttcgcaaggggcaaaacacacatttcgcgaaaaaagcgcacaatatacgcaaaaaggagcgccgcagcgccccttttgtatcttatttcggtttgaaattacttccaaagcgggtcgggatatgtgccgttttgcatcatctcggcaagcgccgccatcacgacgggcttatcggccttatacgtcacgccgaaccacttgtccgccgattttaaaaccgtcacgtctgccttgccgtcgcgaatctggtcgttgacgacaaacggcaggaagtattccgctttcagcgggttcttcggcacatcgttctcgaggaacgagacgaaatccttcttcaatgcgtccacaaagtccggcgtaaagccccacaggttcatggagacggtcgtgtcttcatcgagcgcgtgccacgttgcgccgtcgtcctcggtgtaagccgggccgtcctcgcgcttttcaatgtgcgtgcgctccacgatggtatccaacacgccgtctttctccacgcatacgccgcgtgccacatggccgttttcggtcagcgtgtttttcagatgatagcccaccatcgcccaatgtgccttttcaccgtcttccttcacgttccggaggaacgcgccgattttcttaaacgcctcgccgccgtagaaatcgtccgcgttgatgacgacaaacggcgcatcaatgtggtcgcgtgccgccaaaacggcgtggcccgtgccccacggtttctcgcggccttccggcaccgtaaagccctccggcaggtcatccaacttttggaaaacatactcgacctgcacgtacttcgatacgcggtcgccgatgacctctttaaagtcctcaaaaagctgctccttgatgatgaagattaccttggaaaagcccgcctgcacggcatcaaaaacagaaaaatccatgataatctcgccgtttttgccaacgggatcgatctgcttcaggccgccgtaacggctgcccataccggccgccataacgactaaaatcggttttttcatagctaaattgtcctttctcgtctgcggcatcacaccgccatatgtacaggttcggtcacgcggccgtcaggggtcagttttcatcctcgtaaataaattcgtggatatgctgtgccgcaacatcggtgtcatacgtccacatccaaccgccgccctcgcagtaatcggaggcatagccctccacatcactcgggatggaaaggcgctcaatgtcaaagcccgtcagcgcaatctgcgccagaccgatcatcttatcaaacgtcaaagaagtctcgcaaagcggcgcaagctgttgaatgatgctcgggtattcaagcttggaaatagaacttgccttgctcaaaagcgcagaaagcacttcctgctggcgttccacacggccgttatcgttgtcgatggcacgaatacgcccgtaagccacagcttcgtcgccgttcaagagcacgccctcgcccgccgaaagcggcgcgtatgtagaaacatcgcctgccattgattcaggggattccgccgccagcgcgtacatatttttgttgatctcaccaacttcatcttccgtcaaatcaatatttacaccgccgaacgcatccacaatcttcgccatggcggagaaattcacggtcacgtagtcctgaatatcgagaccgaagttctggttgatcgcacggatggcctgctccgggccaccgtacatataggcatggttcagcttatcatagccggaatcatacgggctgccgtcgcccatatacacgcgcacatcacgcatgatggacgtcagcttaaccttgtggtgcacgttatcgatcgacatcaccataatggcgtcgctgcgcccggcaaaggtaccgccgtcataatcgcgggcatccacaccgaacagcgcaatattcgtaatgcccgcttccgattttgtttcttcggaaataccgagctccgtcttgtctttcgtgatggtcgtcgtcttcaggtcgcccaaaagcaccgtggaagcgtagatcatcacgccgcccaccaacaccaaaataacgcagatgaagctcaaaaagaccttaaggcccgtccgttttttctttttttgatttttcttatacgcctgctttgaggagtaactggaaatatcctgaaactcatcgcggcgttgttttcttttcgccataaaagcctccgtctcggccaaaggccggatgtctttatcttatcaattatattcccataacctcgtttcgtcaatttactttttcttacgaaaaacgaccagtttgcttaaaatataatttgcaaggatcacaaaaatgttcgcgacgagcttcacaatcttatcattcacgtgcagcagatccacaccgatgaacatcatgcccatttccataaagccggacgcaatacggctcgcaaaaaatttcgccgcctccgtcaaaatcggcacaaagccgtgcgcgcggctctcaaacacccagttgcggttcgtcacatacgcaaaggtaactgaaagcacccacgaaagcgctgtcgataccatgtacgggatgtgcagaaaatccgtaaagatccagtaagaagcgtagctcacgaccgtcgtaagcacgccgaacaccacgtacaaaaccagctctttgtattttataagcagttctttgatttttcccatattttttatcctttatgtttcgggcaaagcgccctcttctttcttatgataaatattcttccacaccgtgcgccgccaccgcgccgtccgcagccgccgtcacgatttgccgcagcgtctttttacgacagtcgcccgcagcaaacacacccggaacgttcgtcttcgtgctctcgcccgccataaaatacccgctttcgtcaaggtcaagaatatcgcgtacaaagtccgtcgccggcacattgcccaccgccacaaacacgccgttcacctcaatctcgcacacctcgtccgtctttacattgcgcagacgcagcccgccgacttttccgtctttttcgaggatctcatccgtcaccgtatcgaaaacgatctcgatattcggcttatcgagcttcttctcatagctctttgaagcgcgcaagcggtctcttctgtggatgaggtatacctttttgcacatcgcggagagaaaagccgcatcgcccgccgccgtgtcaccgccgccaatgaccgcaaccgtcttatctttataaaacgcaccgtcgcatgtcgcgcagtaggaaacgcccttgccgcgcaaagcgtcttcgttcggcaagccgagcgtcctcggcgccgcaccgggtgccaaaacgacgcttttcgcgcggtaaaccgtgccgtcttccgtctccagaattttcgcatcatcgtctaaccgcagtgccgtcacgttgccgtaggtctgcttcgcgccaaagcgctccgcctgctttttcatgttcatcgtcagcgtaaacccgtccaccgcctccgggaagccggggtaattttcaatttcattcgaggtcaccatttgaccgccggggatatatttttccagcaccagcgtctcgtagcccgcgcgggcgcaatacagtgccgccgtaagccccgcagggccggaacccaccacgattacgtcatagaccttttccatgttttcgctcataagtcaccgctccttttcctggtgaagtgcagcttttctgcataccgtcttgcgaacatcgttagtatagcacattctcccgaaaaatacaattccgtgcggcgcgaaagagttttctaccgcaaagcgacacgcagtcgaaaactttatcagaattaaatacgtgctcccgttctcctacttaaaccaaaaaacatgcaaaccgcgcgccttgcacgacatcccccctatcgcacaaaacaaaagaggctctttcggcatcccgaaaaagcctctcgttctttaatttttattgcacatcttgtgcggtgtacgctcagcgcacacatctcatgttaattcaaattgatactaatacatcggactttcctctgcttgaaaccatcggtctctttttatacctgcactctgcattactttcagaatgtcgtcggtctttcagagtttatcatttgtgcattggacacaactccatgtatattctcaaaaactgtatttgattttttctttggcgttttccgcctgtccttacacacgtccgtacactttgtacagcccatgtataattctatatgttaatttcgacctacttatctttgctgtaccacgaaaaccttttgggactcgcttttgcgatcccgcgctttcataaagcttgaaacactcgtgtgcaaatattcagtctacttcagggatccgaggcgcaacgcaccacggatcttctgctgctgaggttcagtagccattggcctcacccgctttctttcaatagatttgcctttgcggctcatgcagctttgcctcttttcacgttttgcctgtttccacatgttcaaaacgtgcggctgcttctttatttatgttcccgtttctccgcttcggctttttgtccctttgtaccggcacattcttaaaagcctacttatctctttcatcacatttcccggaagccgaagaacatttgaagctccgcctttgcaaatactgcctcaagagtttcctccgcgcctttctctctccccttcggaatactttccgcgcgctgaaccgcttcgatcttttaccgagacttttttgagcctccaccaagaaaacctcttacggttttcccgatctactttgcgttctggagttctttctcttttcacctatatattagcaccatccgtctactttgtcaacagtttttttgaagattttattttttatttgtatattctgttttcgcaaaatgaagcttgacattcttccgcattcacgatacaattattcttgcaggcaaaagcaacgggcttattttccacagcttttctgctccgccgcataaatcacagaacggcgaatatactgagaaagaaggcttttcccatgagtatagacaacaaccaggaatacgaagcagagctcatcaccctcatcgacgatgaaggcacggagcacgaatttgagatcatcgatgaactcgagaacgatgacggctactttatggcgcttgtccccactctgcgcgacgcccaaagcgaagttgcagacgcagatgagtactacatctttgaagtcgtagaagacgagaacggcgaagagcagctttgcgagatcgaagacgacgacctgctggataagctcgccgaaattttcgagacccgctatgcacaggctatggaggaagaagaggagtaatcttctttccccgttcaagatcatgtaaagacacctgcccgatgcgcggaccgtgcaaaataaccctacactcaacttttagggagctcggctccgcaggcggactgcagacctcccggcccggcttgaccggataccggaagaagggagcgcgaaacctgcgggagggcacccacctgcttattacgtagcaggttattgagagcacgttacggtcgggcggggttttttatgcccatttcaaggcggtgaaaaccgccttttttcatactttacacacctttttctgtgcttttcttttggaaacggttgtattttgcaaatttttccgcatttgggtgcggtagcaaagaaggagaaggtcatcatgaccagaaaacagtattttttaagcggactcaaagatggaatgcccatttgcttcgggtactttgccgtttcgttcgcgtttggcattcaggccgcaggcatcggactttcggtgtttgaagcctccgtgctctccgccctaaacgtcacctccgccgggcaattcgcagcactcgccatcatcgcatcgggtgcgtcgctcatcgagcttgcattcacgcagctcatcatcaacctgcggtattttctcatgtcgtgtgcgctctcgcaaaagctctcgccgagcctgccccttgggcaccgcctcggcatcgcctacggcatgacggatgagatcttcgccgtcagcgtcagccaaagggagcctctctcaccgttttacagctatgggctcatcgccgtcgccattccgggctgggtgctcggcacggcactcggcgcggcggcgggcaacattctgccggccgttttgacgaacgcgctcggcatcgcgatctacggtatgttcattgccatcatcctgccgcctgcaaaggagaaccgcgtcgttgccggtgtggtcgtcctttccatggtgctttccgcactgttcacgtatctgccggtgctgtgcaacatttcctcgggcttccgcatcattgtcatcacgcttatcaccgcaggcggtgcagcgctgctgttccccatcccggatgagcccgcagaaccggaaaaggagatgccgcatgagggttgaggttttcctttacatactcgtcatggcggccgttacgtatcttatccgtatgctgccgctgacgctcatccgccgcaagatcacgaaccgcacactgcgctcgtttctctattatgtaccgtacgccacgctttccgccatgaccttcccggcaattctcactgccaccggcagcgccatcagcgccgcgctcggctttgccgccgctttgattttagcattccgcggtaaaagcctgctcaccgtcgccattatcgccagcgccaccgtgcttgtgtgtgaactcatattgccatatctgccgctgtaaagcacagtttgcaacgtaaaagtttcgcccgcctttttctcaataggcgggcgaaacttttaactatcgttatagaaagccttgtgtttactctctctcaaaatgctttgcgaccgtctgcaagtactcgatgatcggcaaatgctgcggacatacaccctcgcactggccgcactgaatgcacgcgctcgctttgccgaagtgctttgcgacgttctcgtaatactcgctctgcggcgtccagccctcgtccggagtgattcctctgccgcgcagctcctgcatatcggcgttgtacagcgagaaatacttcgggattgcaatctgcatcgggcagccgtccgtgcagtacgaacagcccgtacacggaatatcgatgctcgcgttgatgatgtccgtcgcctttttgataagcgctttttcctcatcgttcagcggcttaaaatcctgcatgtacgatgtgttgtccaaaagctggtccatatcactcatgccggaaagtacgatcttcacgttcggcaggctcgctgcgaaacgaattgcccaagacggtacggaagcttctggattatagctcttaaacagcttcgtcacttcttccggcacgtttgcgagcgtaccgcccttcaccggctccatgacgaataccggcacgccgtgcttttcggcaacttcatagcattttctggactgcacaccggcgctttcccagtcgaggtagttgagctgtaactgcacaaactcaaactccgggtgcgtggtcagcacttcgtccaacagctccgggccgtcgtggaacgagaagccgatgtgctttacaaggcccttttctttcttgtcgcggatccagccgaagcaatcgaacttatcgtacgtctcaatgctatggcagttgatgtcgtggatgaggtagtaatcaaaatatgttacgcccgtcttttccatctgctcattaaaaatgcggtcgcggtcttcaaacgaattcacgaatgacgaatgcagctttgtcgtcagcgtgaagctgtcgcgcggatggcgggaaacaagtgcttccttcacggcgttttcgctcttgaatgcgcagtacatccacgccgtgtcaaaatacgtgaagccgcgctcgatgaacgtatccaccattttcttgacctgctcaatgtcgatcttgcccgggtcgttcgggtccagagacggcagacgcatgaggccgaagcctaatttcttttcagacattttactcatactccttatgtaaaaaattccaagcattttgcttcctatatcttacaacttaaagtatactctaagtcaagcttttttgtaaaattatttttccgcctcgaaatattcctcccgcagtagcgaaaactgcatgtcatcgcggatttcgctttctgacgtacgcacgcagcggcggatacacccttcatacacaaaccccaaggatctcagcaacttttccgaagcaatattccccgtgaaaacacgcgctgctacaacttccagatcttcttcggcgaatagttcatgcagcacagcccgcagtgcttctttcatatagccctgccgcgtatattgctccccgagataatacgaaagacatctcgagcgcacatcgaaccgaacgccgtcctcctccgccgcaatcataccaagcaaagcgccgtcctcttttcgctcaatataccatgtgttttcataatcgatttccctatgaatcaaatgaaccatctgctctttatcaagcactttcattacgttgtttttcattacgaaagcgctgttgcgtatggccatgatctccgccgcatctctctcccgcggcgtgcgcagtaaaagtctttctgtgtgcagttctctcatattttccctgcctttctttgccgtgtgtacgtatttcggataaaaaacaccctttcctccataaaagcggaagaaagggtgcgaaaatcaattcagtcttttgctgcatgatgcagcgtcaaaacacctgatttttccagcgcctaagccgaaatcagatctcagcgaagtacttgatggttctgaccatctggctggtgtaggagttctcgttgtcgtaccaagaaacaacctgaacctcatagaggtcgtcagcaatcttggagaccatcgtctgggtagcatcgaacagggaaccgaatctcatgccgataacatcggaagaaacgatcggatcgcagttgtagccgaagctctcagaggaagctgccttcatagctgcgttgatgccgtcgacggttacgtcagcgcccttaacaacagcggtgaggatggtggtggaaccggtcggaaccggaacacgctgtgcggaaccgatgagcttaccgttcagctccgggataacaaggccgatagcctttgcagcgcccgtggagttcggaacgatgttagcagcgccggcacgtgcacggcggaggtcaccctttctgtgcgggccgtcgaggatcatctggtcgccggtgtaagcatggatcgtgctcatgatgccgctctggatcggagcataatcgttcagtgccttcgccatcggagcgaggcagttcgtggtgcaggaagcagcggagatgatggtgtcatcagccgtcagggtcttctcgtttacgctgtaaacgatcgtcgggagatcgttgcctgccggagcggaaataacgaccttctttgcgcctgcgtcgatgtgagcctggctcttagccttagaggtgtagaagccggtgcactcgagaacaacgtcaacaccgatctcgccccacggaaggtccttagcgtccttctcagcgtagatcttcagggtcttgccgtcaactgtgatggtgttagcctcgtcgtcagcggaaaccgtgtggagagcttcgccgatcttgccgcagtaaccgccctgtgcggtgtcatacttgagcaggtgagccagcatggagggcttcgtcagatcgttgatcgcaacgacctcataaccctcagcgccgaacatctgtctgaacgccagacggccgatacggccgaaaccattgattgcaactttaactgccatgattgtatacctcctgataattgtggatgcataatttgcaattctattttatagcatttcgcaggattttacaagggctaactgctaaaaatgcaaactttttccgtaattttcagaaaatttacgcgtttcccgtgtcttttaaagcattttcttctaaattgctctccgctttcgcagaagcgcgctgcccgctcgccgtaagcagcaggcaaaggctgtgaacagaaaggcacagcatcgcaagctggatcacatacggcatctccgtcgcatacccgcgccccgcaataatgagcaccgtgttcgagatcacatacgtcatccaaagcaccgccgccggcaggccgaacacatatgtgctgcgcagcgcctttttgccgcccgcaccggagagcagcttgccttcggaaagcaggaacagcagcatcatcgcaccgccacccacggtaaagatattttcctccgtcgtcgccacagcggaatacgtcatgaacgtcacgatcatatacgaaatgccccaaacggaaccgatggcccaaagcccgcccgtgccgctcgggaagccctcgcccgtcagccatataatggcaaaaatgagagaaacaatcgcgaaaagcaacgttaagaccgcaaacggcaaatgcgtcgtcacatgcgaagcctgcacaaagtaggtcggctgattgttgcggtataagtaaaagtcccgcagaagcgctgccgcacacaaaaacaaaaatacacacatcagaagcgcagaagcacccgccgccgcatttcttttcgtctctatgcgcgcgcaaagctttttgtccacacggcacaaaagcatacagagaagcgatacgccgatcgccgcaccgcagtaaatatacgtcaacagtccactgtccgtcacaaagcccgtgtcataatcaaaaaagcagagcatctgcacgcagcgcagcgcagccgccgcaaagatgccgattcctgccaaaacaaacgccaatttcactttcttattcatatatcatacaccgcccacaccctcggggctttcctttcatcgattcattcgccgtccgaatttgcggcacatcggttcactgtgttttattttagcacattccgcctaagatgaaaacaccccgcaaaaaagatttttaatttcctgttgacaacaaactttcaagtgattataatatatgccatagtaaacaattaagcgcatgattgtttacataggagcagattcgattctgctgtacggcggggccttctccccgcgagaacagatgaaaggatggtaacaatgcacgatcataaaaaagagcccatcggccatgcattgcatgtgctggataccaccatgcgtcggtacatcgacacgtattcccataaaaaggaacacgaaaacctcaccggcacaaacacatgggtcatccagttcatcgccgatcacaaagacgggcccgtgtatttgcgcgatattgagcgccgcttcggcattacgcgttccaccgcctccaaagtggtggatatgcttgtgcgaaacggttttgtggagcgccacaccggcgaaacggacgcccgcctgcgtcgtctgaccctgacggaaaagtcagaaaaccttttggccgatattcgcgccgaccacgaagcaatggaagccgttttaacgaaaggcttcacgcaaaatgaaaaagaaaccatgctcacttatttacggcgcgcaaaaataaatgtagatgctgcctttgccgaaaagcagcaaaagaaagaaaggagcggtgcagatggttaaaaaactgatggaaagcatccgcgaacagaaaaagaattccatattggccatggtcaccatcagcggtgaggtcgtcttcgaggtcatcatcccgcttttaatggcgaatctcatcgattacggcattgacatgggcgatatggggtacattgtcaaaatgggcattgtcctgttgctctccgcactgggtcagcttttctgcggtgccatttccggtaaattcgcagccattgcctccagtggctttgcccgcaacctgcgccacgacatgttctacaaggtgcagaattattcattctcaaacattgataagttttccaccgcaagtatcgtcacgcgtctgacaacagacgttacgaatctgcaaaacacttaccaaatgatcatccgcatggcggtacgcagcccgcttatggcgatcttctcgcttgtcgcggcattcggcatcgacgccaagctctcgcttatcttccttgccatcatcccggtgctcgttctcggcctgtacttcatcatgacgagaacgcacccgatcttcgagcgcgtgttcagaacttatgataagctgaacagcgttgtgcaggagaacctgcacggcatccgcgtggtaaagtcctttgtccgtgaagatcacgaaaataagaagttcaccggcatttccgaaaatatctataaggacttcaaaaaagccgagcagcagctcgcatggaacgccccactgatgcagctttgcatgtacgcggcggtgctcctgctctcctggttcggcgcacgcaccattgttgcttgcggcggtgacgcagcgaccggtctttccaccggcgaacttctgagcctgctgtcttacgccacgcagattctcatgagcctcatgggcctctctatgatctttgtcatgctcaccatgtcccgtacctccggcgagcgtgtcgttgagctgctcaacgagaccccggacatcaccacccccgaaaatgccgtaaagagcgttccggacggcagcatcgatttcgagcatgtccagttcagctatcgtcacggcacagagggcaaacccgtgctttccgatattaacctgcacattccggcaggcgccacggtcggcgtcatcggcggcaccggttcctccaagtcgagcttcgtgcagctcatcccgcgcctgtacgatgttgacctcggtgctgtcaaggtcggcggcatcgacgtccgcaaatacgacctggataccctccgcggcgacgtcgccatggtgctgcaaaagaatgtcctgttctccggcaccatcaaggacaacctgcgctggggcgatgaaaatgccaccgacgaggagatccgccatgcctgtcagctcgcacaggccgatgacttcattcaaaccttccctaaaggctacgatacctacattgagcagggcggcacgaatgtctccggcggccagaagcagcgcctctgcatcgcgcgtgcgctgctaaaaaagccgaagattctcattctggacgactccaccagcgcggtcgatacccgcacggatgcgcttatccgcggcgcgttcgcaaaggagatcccgaacacgacaaaaatcatcatcgcccagcgcatcgcctccgtacagggagccgatatgatccttgtcttagatgacggcaagatcgtcagctgcggcacgcatgacgagctcatgcaaacaagcccgatctaccgcgaagtttatgaatcccagacgaaaggagatcctgacaatgccaccgcgtcctaatggtcccagactctccatgaaagaaagcatgaagcagctcgataagaagaccttattccgcctgctttcctatatgaaaccgtacaggctgcaccttgtgttcgtgttcatctgcattgcggtgagcgctttcgcaagtgtcatgtcctccctgtttttaaagtccctcattgatgattacatctccccgctcctgctcgaatccaatccgaactttagcggtcttctgtatgcgctgctccaaatggcagtcatttacgtcatcggcgcgttctctacgctgttctacaaccgcaccatggcagttgtttcacagggcacgttaaagaaaattcgtgacgagatgttcgagcacatgcagacgctgcccatcaagttctttgatacgcacacccacggcgacatcatgagcttctacacaaacgatacggacaccctgcgccagatgatttcccagagcattccgcagacgctttcctccatcttcacggtcgtttccgtgttctgttctatgttaacgctcagcatttggcttaccctgttcctgatcgcgttcctctttgtcatgtttaagatcgtcggcaaggtcaccgcaaaaagtggcagctattttgttcgccagcagcaatccctcggtaatgtgaacggctacatcgaagaaatgatcaacggtcagaaggttatcaaggtcttctgccacgaagacaaaacaaaggtcgagttcgacaaacgaaacgacgacctcttcacaaacgcttccgaagcgaataagtttgccaatatcctcggccccatcatgaacgcactcggctacttcctttacgtgctcatcgccgtgcttggcggcggtctcgcacttgcaggcgtaccgaacctgaccctcaccggcatgggcgtcatgacgctcggcggcatcgcgtcgttcctgcagctctcccgcagcttcgttatgccgatcagccaggtcacgcagcagatctcgtccatcatcatggctatggcaggcgcttcccgcatcttctctctgctcgatgccgagagcgaaaaggacgagggctacgtcacgctcgtcaacgccgaaaagaaaaacggcgtgctcaccgaaaccgacaagcacaccggcctttgggcatggaagcatccgcataaggacggcacggtcacctatacggagctcaccggtcacgtagagcttgaggatgtcgattttggttataccccggagaagaccgtcctgcatgacatcacgctttacgcagagcccggccagaaggtcgcgttcgtcggcgcaacgggcgcaggcaaaacgaccatcacaaaccttatcaaccgcttctatgacatttctgacggaaagatccgctacgacggcatcaacatcacgaagatcaagaagccggatctccgccgttccctcggcgtggttttgcaggacgtcaacctgttcaccggcaccgttatggagaatatccgctacggtaagctcgatgccacggacgaagagtgcatcgccgccgcaaagctcgcaaacgccgacggcttcattcgtatgctgccgcagggctatgacaccgttctttccggcgacggcagcggcctctcacagggccagcgtcagctcatttccatcgcccgcgccgccgttgcagacccgcccgtcatgattctcgatgaagcgacgtcctccatcgatacccgcacggaagccatcgtgcagtccggcatggacgccttgatgaaaggccgcaccgtgttcgtcatcgcgcaccgcctatcgacggtccagaactccgacgtcatcatggtgctcgaccacggccacatcatcgaacgtggcagccaccgcgacctcatcgcgcagaaaggcacctactaccgcctctacaccggcgcattcgagctggaataaggtaaattcaaagcgataaacgaaaactccgtttgctgatgagcaagcggagttttttgctgcgcaaaaacagccccgttcacgtcggtgaacagcaccccatttgttagacagtatgatataatgtttaacaggtggggtgattttaatgccaaagggagtaccaaacaaacgatacacgccggaattcaagaagctggtcgtggaaaccatgatgaaagaaaagatgagttacagagaaacggctcgacaatttgaaatcagcaatcatcacagagtacaagactg
